(19) United States
(12) Patent Application Publication
(10) Pub. No.: US 2009/0186008 A1
(43) Pub. Date: Jul. 23, 2009

(54) FLEA HEAD, NERVE CORD, HINDGUT AND MALPIGHIAN TUBULE NUCLEIC ACID MOLECULES, PROTEINS AND USES THEREOF

(76) Inventors: KEVIN S. BRANDT, WINDSOR, CO (US); PATRICK J. GAINES, FORT COLLINS, CO (US); DAN T. STINCHCOMB, FORT COLLINS, CO (US); NANCY WISNEWSKI, FORTCOLLINS, CO (US)

Correspondence Address: SHERIDAN ROSS P.C., 1560 Broadway, Suite 1200, Denver, CO, 80202-5141, US

(21) Appl. No.: 12/034,516

(22) Filed: Feb. 20, 2008

Related U.S. Application Data
(62) Division of application No. 10/978,245, filed on Oct. 29, 2004, now Pat. No. 7,348,410.
Application No. 10/978,245 is a continuation of application No. 09/991,936, filed on Nov. 21, 2001, now abandoned.
Application No. 09/991,936 is a division of application No. 09/543,668, filed on Apr. 7, 2000, now abandoned.
(60) Provisional application No. 60/128,704, filed on Apr. 9, 1999.

(51) Int. Cl. A61K 38/43; C07H 21/04; C12N 15/52; C12N 9/00; C07K 16/40; C12Q 1/25

(52) U.S. Cl. 424/94.1; 536/23.1; 536/23.2; 435/183; 530/387.9; 435/4

(57) ABSTRACT

The present invention relates to flea head, nerve cord, hindgut and Malpighian tubule proteins; to flea head, nerve cord, hindgut and Malpighian tubule nucleic acid molecules, including those that encode such flea head, nerve cord, hindgut and Malpighian tubule proteins; to antibodies raised against such flea head, nerve cord, hindgut and Malpighian tubule proteins; and to compounds that inhibit flea head, nerve cord, hindgut and Malpighian tubule protein activity. The present invention also includes methods to obtain such proteins, nucleic acid molecules, antibodies, and inhibitory compounds. Also included in the present invention are therapeutic compositions comprising proteins, nucleic acid molecules, or protective compounds derived from proteins of the present invention as well as the use of such therapeutic compositions to protect animals from flea infestation. Also included in the present invention is the use of flea head, nerve cord, hindgut and Malpighian tubule proteins to derive inhibitory compounds.

### CROSS REFERENCE TO RELATED APPLICATIONS

[0001] This application is a Divisional of co-pending U.S. patent application Ser. No. 10/978,245, filed Oct. 29, 2004; which is a Continuation of U.S. patent application Ser. No. 09/991,936, filed Nov. 21, 2001, now abandoned; which is a Divisional of U.S. patent application Ser. No. 09/543,668, filed Apr. 7, 2000, now abandoned; which claims priority to U.S. Provisional Patent Application Ser. No. 60/128,704, filed Apr. 9, 1999; all of the foregoing entitled “NOVEL FLEA HEAD, NERVE CORD, HINDGUT AND MALPIGHIAN TUBULE NUCLEIC ACID MOLECULES, PROTEINS AND USES THEREOF”, and incorporated herein by reference.

### FIELD OF THE INVENTION

[0002] The present invention relates to nucleic acid molecules isolated from the head and nerve cord of a flea, nucleic acid molecules isolated from the hindgut and Malpighian tubule of a flea, proteins encoded by such nucleic acid molecules, antibodies raised against such proteins, and inhibitors of such proteins. The present invention also includes therapeutic compositions comprising such nucleic acid molecules, proteins, antibodies, and/or other inhibitors, as well as uses thereof.

### BACKGROUND OF THE INVENTION

[0003] Flea infestation of animals is a health and economic concern because fleas are known to cause and/or transmit a variety of diseases. Fleas directly cause a variety of diseases, including allergies, and also carry a variety of infectious agents including, but not limited to, endoparasites (e.g., nematodes, cestodes, trematodes and protozoa), bacteria and viruses. In particular, the bites of fleas are a problem for animals maintained as pets because the infestation becomes a source of annoyance not only for the pet but also for the pet owner who may find his or her home generally contaminated with insects. As such, fleas are a problem not only when they are on an animal but also when they are in the general environment of the animal.

[0004] Bites from fleas are a particular problem because they not only can lead to disease transmission but also can cause a hypersensitive response in animals which is manifested as disease. For example, bites from fleas can cause an allergic disease called flea allergic (or allergy) dermatitis (FAD). A hypersensitive response in animals typically results in localized tissue inflammation and damage, causing substantial discomfort to the animal.

[0005] The medical importance of flea infestation has prompted the development of reagents capable of controlling flea infestation. Commonly encountered methods to control flea infestation are generally focused on use of insecticides. While some of these products are efficacious, most, at best, offer protection of a very limited duration. Furthermore, many of the methods are often not successful in reducing flea populations. In particular, insecticides have been used to prevent flea infestation of animals by adding such insecticides to shampoos, powders, collars, sprays, spot-on formulations foggers and liquid bath treatments (i.e., dips). Reduction of flea infestation on the pet has been unsuccessful for one or more of the following reasons: failure of owner compliance (frequent administration is required); behavioral or physiological intolerance of the pet to the pesticide product or means of administration; and the emergence of flea populations resistant to the prescribed dose of pesticide.

[0006] Thus, there remains a need to develop a reagent and a method to protect animals from flea infestation.

### SUMMARY OF THE INVENTION

[0007] The present invention relates to a novel product and process for protection of animals from flea infestation.

[0008] The present invention provides flea head and nerve cord (HNC) proteins and flea hindgut and Malpighian tubule (HMT) proteins; nucleic acid molecules encoding flea HNC proteins and flea HMT proteins; antibodies raised against such proteins (i.e., anti-flea HNC antibodies and anti-flea HMT antibodies respectively); mimetopes of such proteins or antibodies; and compounds that inhibit flea HNC or HMT activity (i.e, inhibitory compounds or inhibitors).

[0009] The present invention also includes methods to obtain such proteins, mimetopes, nucleic acid molecules, antibodies and inhibitory compounds. The present invention also includes the use of proteins and antibodies to identify such inhibitory compounds as well as assay kits to identify such inhibitory compounds. Also included in the present invention are therapeutic compositions comprising proteins, mimetopes, nucleic acid molecules, antibodies and inhibitory compounds of the present invention including protective compounds derived from a protein of the present invention that inhibit the activity of HNC and/or HMT proteins; also included are uses of such therapeutic compounds to reduce flea infestation.

[0010] One embodiment of the present invention is an isolated nucleic acid molecule that hybridizes with a nucleic acid sequence having SEQ ID NO:1, SEQ ID NO:3, SEQ ID NO:4, SEQ ID NO:6, SEQ ID NO:7, SEQ ID NO:9, SEQ ID NO:10, SEQ ID NO:12, SEQ ID NO:13, SEQ ID NO: 75, SEQ ID NO:16, SEQ ID NO:18, SEQ ID NO:19, SEQ ID NO:21, SEQ ID NO:22, SEQ ID NO:24, SEQ ID NO:25, SEQ ID NO:27, SEQ ID NO:28, SEQ ID NO:30, SEQ ID NO:31, SEQ ID NO:33, SEQ ID NO:34, SEQ ID NO:36, SEQ ID NO:37, SEQ ID NO:39, SEQ ID NO:40, SEQ ID NO:42, SEQ ID NO:43, SEQ ID NO:45, SEQ ID NO:46, SEQ ID NO:48, SEQ ID NO:153, SEQ ID NO:155, SEQ ID NO:156, SEQ ID NO:158, SEQ ID NO:159, SEQ ID NO:161, SEQ ID NO:162, SEQ ID NO:164, SEQ ID NO:165, SEQ ID NO:167, SEQ ID NO:168, SEQ ID NO:170, SEQ ID NO:1859, SEQ ID NO:1860, SEQ ID NO:1861, SEQ ID NO:1863, SEQ ID NO:1864, SEQ ID NO:1866, SEQ ID NO:1867, SEQ ID NO:1869, SEQ ID NO:1870, SEQ ID NO:1871, SEQ ID NO:1872, SEQ ID NO:1874, SEQ ID NO:1875, SEQ ID NO:1876, SEQ ID NO:1877, SEQ ID NO:1878, SEQ ID NO:1880, SEQ ID NO:1881, SEQ ID NO:1882, SEQ ID NO:1884, SEQ ID NO:1885, SEQ ID NOQl 886, SEQ ID NO:1887, SEQ ID NO:1889, SEQ ID NO:1890, SEQ ID NO:1891, SEQ ID NO:1892, SEQ ID NO:1893, SEQ ID NO:1894, SEQ ID NO:1895, SEQ ID NO:1896, SEQ ID NO:1898, SEQ ID NO:1899, SEQ ID NO:1900, SEQ ID NO:1901, SEQ ID NO:1903, SEQ ID NO:1904, SEQ ID NO:1905, SEQ ID NO:1906, SEQ ID NO:1907, SEQ ID NO:1908, SEQ ID NO:1909, SEQ ID NO:1910, SEQ ID NO:1911, SEQ ID NO:1912, SEQ ID NO:1913, SEQ ID NO:1914, SEQ ID NO:1916, SEQ ID NO:1917, SEQ ID NO:1918, SEQ ID NO:1919, SEQ ID NO:1921, SEQ ID NO:1922, SEQ ID NO:1923, SEQ ID NO:1924, SEQ ID NO:1926, SEQ ID NO:1927, SEQ ID NO:1928, SEQ ID NO:1929, and/or SEQ ID NO:1931 under conditions that allow less than or equal to about 30% base pair mismatch. Another embodiment of the present invention is an isolated nucleic acid molecule that hybridizes with a nucleic acid molecule selected from the group consisting of a nucleic acid sequence of Table I, Table II, Table III and/or Table IV, or a nucleic acid sequence complementary to a nucleic acid sequence of Table I, Table II, Table III and/or Table IV under conditions that allow less than or equal to about 30% base pair mismatch.

[0011] Another embodiment of the present invention is an isolated nucleic acid molecule having nucleic acid sequence that is at least about 70% identical to SEQ ID NO:1, SEQ ID NO:3, SEQ ID NO:4, SEQ ID NO:6, SEQ ID NO:7, SEQ ID NO:9, SEQ ID NO:10, SEQ ID NO:12, SEQ ID NO:13, SEQ ID NO:15, SEQ ID NO:16, SEQ ID NO:18, SEQ ID NO:19, SEQ ID NO:21, SEQ ID NO:22, SEQ ID NO:24, SEQ ID NO:25, SEQ ID NO:27, SEQ ID NO:28, SEQ ID NO:30, SEQ ID NO:31, SEQ ID NO:33, SEQ ID NO:34, SEQ ID NO:36, SEQ ID NO:37, SEQ ID NO:39, SEQ ID NO:40, SEQ ID NO:42, SEQ ID NO:43, SEQ ID NO:45, SEQ ID NO:46, SEQ ID NO:48, SEQ ID NO:153, SEQ ID NO:155, SEQ ID NO:156, SEQ ID NO:158, SEQ ID NO:159, SEQ ID NO:161, SEQ ID NO:162, SEQ ID NO:164, SEQ ID NO:165, SEQ ID NO:167, SEQ ID NO:168, SEQ ID NO:170, SEQ ID NO:1859, SEQ ID NO:1860, SEQ ID NO:1861, SEQ ID NO:1863, SEQ ID NO:1864, SEQ ID NO:1866, SEQ ID NO:1867, SEQ ID NO:1869, SEQ ID NO:1870, SEQ ID NO:1871, SEQ ID NO:1872, SEQ ID NO:1874, SEQ ID NO:1875, SEQ ID NO:1876, SEQ ID NO:1877, SEQ ID NO:1878, SEQ ID NO:1880, SEQ ID NO:1881, SEQ ID NO:1882, SEQ ID NO:1884, SEQ ID NO:1885, SEQ ID NO:1886, SEQ ID NO:1887, SEQ ID NO:1889, SEQ ID NO:1890, SEQ ID NO:1891, SEQ ID NO:1892, SEQ ID NO:1893, SEQ ID NO:1894, SEQ ID NO:1895, SEQ ID NO:1896, SEQ ID NO:1898, SEQ ID NO:1899, SEQ ID NO:1900, SEQ ID NO:1901, SEQ ID NO:1903, SEQ ID NO:1904, SEQ ID NO:1905, SEQ ID NO:1906, SEQ ID NO:1907, SEQ ID NO:1908, SEQ ID NO:1909, SEQ ID NO:1910, SEQ ID NO:1911, SEQ ID NO:1912, SEQ ID NO:1913, SEQ ID NO:1914, SEQ ID NO:1916, SEQ ID NO:1917, SEQ ID NO:1918, SEQ ID NO:1919, SEQ ID NO:1921, SEQ ID NO:1922, SEQ ID NO:1923, SEQ ID NO:1924, SEQ ID NO:1926, SEQ ID NO:1927, SEQ ID NO:1928, SEQ ID NO:1929, and/or SEQ ID NO:1931 and/or a nucleic acid sequence of Table I, Table II, Table III and/or Table IV or complements thereof.

[0012] The present invention also relates to recombinant molecules, recombinant viruses and recombinant cells that include a nucleic acid molecule of the present invention. Also included are methods to produce such nucleic acid molecules, recombinant molecules, recombinant viruses and recombinant cells.

[0013] Another embodiment of the present invention includes an isolated flea HMT and/or HNC protein that is at least about 70% identical to an amino acid sequence selected from the group consisting of SEQ ID NO:2, SEQ ID NO:8, SEQ ID NO:14, SEQ ID NO:20, SEQ ID NO:26, SEQ ID NO:32, SEQ ID NO:38, SEQ ID NO:44; SEQ ID NO:154, SEQ ID NO:160, SEQ ID NO:163, SEQ ID NO:169, SEQ ID NO:1862, SEQ ID NO:1868, SEQ ID NO:1873, SEQ ID NO:1879, SEQ ID NO:1883, SEQ ID NO:1888, SEQ ID NO:1897, SEQ ID NO:1902, SEQ ID NO:1915, SEQ ID NO:1920, SEQ ID NO:1925, and/or SEQ ID NO:1930, and/or an amino acid sequence encoded by a nucleic acid sequence of Table I, Table II, Table III and/or Table TV, and fragments thereof, wherein such fragments can elicit an immune response against respective flea proteins or have activity comparable to respective flea proteins.

[0014] Another embodiment of the present invention includes an isolated protein encoded by a nucleic acid molecule that hybridizes with the complement of a nucleic acid sequence having SEQ ID NO:1, SEQ ID NO:4, SEQ ID NO:7, SEQ ID NO:10, SEQ ID NO:13, SEQ ID NO:16, SEQ ID NO:19, SEQ ID NO:22, SEQ ID NO:25, SEQ ID NO:28, SEQ ID NO:31, SEQ ID NO:34, SEQ ID NO:37, SEQ ID NO:40, SEQ ID NO:43, SEQ ID NO:46, SEQ ID NO:153, SEQ ID NO:156, SEQ ID NO:159, SEQ ID NO:162, SEQ ID NO:165, SEQ ID NO:168, SEQ ID NO:1859, SEQ ID NO:1861, SEQ ID NO:1864, SEQ ID NO:1867, SEQ ID NO:1870, SEQ ID NO:1872, SEQ ID NO:1875, SEQ ID NO:1877, SEQ ID NO:1878, SEQ ID NO:1881, SEQ ID NO:1882, SEQ ID NO:1885, SEQ ID NO:1887, SEQ ID NO:1890, SEQ ID NO:1892, SEQ ID NO:1894, SEQ ID NO:1896, SEQ ID NO:1899, SEQ ID NO:1901, SEQ ID NO:1904, SEQ ID NO:1906, SEQ ID NO:1908, SEQ ID NO:1910, SEQ ID NO:1912, SEQ ID NO:1914, SEQ ID NO:1917, SEQ ID NO:1919, SEQ ID NO:1922, SEQ ID NO:1924, SEQ ID NO:1927, and/or SEQ ID NO:1929 and/or a nucleic acid sequence of Table I, Table II, Table III and/or Table IV, under conditions that allow less than or equal to about 30% base pair mismatch.

### DETAILED DESCRIPTION OF THE INVENTION

[0015] The present invention provides for nucleic acid molecules isolated from the head and/or nerve cord of a flea, nucleic acid molecules isolated from the hindgut and/or Malpighian tubule of a flea, proteins encoded by such nucleic acid molecules, antibodies raised against such proteins, and inhibitors of such proteins. As used herein, nucleic acid molecules isolated from the head and/or nerve cord of a flea and proteins encoded by such nucleic acid molecules are also referred to as flea HNC, or HNC, nucleic acid molecules and proteins respectively; and nucleic molecules isolated from the hindgut and/or Malpighian tubules of a flea and proteins encoded by such nucleic acid molecules are referred to as flea HMT or HMT, nucleic acid molecules and proteins respectively. HNC nucleic acid molecules and HMT nucleic acid molecules of the present invention are nucleic acid molecules that are primarily expressed in flea HNC tissues and HMT tissues respectively, but which may be expressed in cells derived from flea tissues other than IINC and HMT. HNC and HMT nucleic acid molecules and proteins of the present invention can be isolated from a flea or prepared recombinantly or synthetically. HMT and HNC nucleic acid molecules of the present invention can be RNA or DNA; examples of nucleic acid molecules include, but are not limited to, complementary DNA (cDNA) molecules, genomic DNA molecules, synthetic DNA molecules, DNA molecules which are specific tags for messenger RNA derived from HMT and HNC tissues, and corresponding mRNA molecules. As used herein, the phrases “HMT and/or HNC protein” and “HMT and HNC protein” refer to a protein expressed by a flea HMT tissue, by a flea HNC tissue, or by both flea HMT and HNC tissues. As used herein, the phrases “HMT and/or HNC nucleic acid molecule” and “HMT and HNC nucleic acid molecule” refer to a nucleic acid molecule that can be isolated from a HMT cDNA library, from a HNC cDNA library, or from both libraries, or a gene corresponding thereto.

[0016] The present invention provides for nucleic acid molecules containing partial or full-length coding regions that encode one or more of the following flea proteins: an allantoinase (ALN) protein, a chitin-binding protein (CBP) protein, a sodium/potassium ATPase beta subunit (NKAB) protein, a ligand-gated chloride channel (LGIC) protein, an ANON/23DA (ANON) protein, a malvolio (MALV) protein, an odorant-binding protein-like (OS-D) protein, a N-methyl-D-aspartate receptor associated (NMDA) protein, a chemical sense related lipophilic ligand binding protein-like (CLBP) protein, a Sodium/Hydrogen Transporter-like (NAH) protein, a Chloride Intracellular Channel-like (CLIC) protein, aPeritrophin-like (PL2) protein, aPeritrophin-like (P3) protein, aPeritrophin-like (PL4) protein, a synaptic vesicle 2B-like (SVP) protein, a voltage-gated Chloride-like (VGCC) protein, an anoxia upregulated protein-like (AUP) protein, and a neuroendocrine specific 7B2-like (7B2) protein. Such nucleic acid molecules are referred to as ALN nucleic acid molecules, CBP nucleic acid molecules, NKAB nucleic acid molecules, LGIC nucleic acid molecules, ANON nucleic acid molecules, MALV nucleic acid molecules, OS-D nucleic acid molecules, NMDA nucleic acid molecules, CLBP nucleic acid molecules, NAH nucleic acid molecules, CLIC nucleic acid molecules, PL2 nucleic acid molecules, PL3 nucleic acid molecules, PL4 nucleic acid molecules, SVP nucleic acid molecules, VGCC nucleic acid molecules, AUP nucleic acid molecules, and 7B2 nucleic acid molecules respectively and are described herein in detail below.

[0017] Allantoinase is involved in the catalysis of the reaction converting allantoin to allantoic acid. This is a middle step in purine catabolism, which in insects results in the secretion of urea as the end product. The enzyme is located in the peroxisomes of the liver and kidney in amphibians. There is no known mammalian homologue to allantoinase, as mammals secrete uric acid, a precursor to allantoin. As such, flea allantoinase represents a novel target for anti-flea vaccines and chemotherapeutic drugs.

[0018] The function of chitin binding protein is largely unknown. A chitinase-like protein of Bombyx mori (GENBANK® accession # 1841851) is reported to have weak similarity with the chitin-binding domain of insect chitinases; however, it has no significant similarity to the catalytic regions of known chitinases, and therefore is not expected to have chitinase activity. The chitinase-like protein of B. mori is also similar to the peritrophin family of proteins located in the peritrophic matrix of insects. These proteins contain putative chitin-binding domains but have no other apparent homology to any known proteins. Without being bound by theory, it is believed that these proteins bind chitin and are a structural component of the peritrophic matrix. As such, flea chitin binding protein represents a novel target for anti-flea vaccines and chemotherapeutic drugs.

[0019] Na+/K+ ATPase is involved in the hydrolysis of ATP to power the transport of Na+ out of and K+ into cells. It is responsible for establishing the Na+ gradient across plasma membranes, which is then used by cells for a number of functions including sugar and amino acid transport, diuresis and nerve cell signaling. The Na+/K+ ATPase pump is a timer of a 100-kilodalton (kDa) alpha (α) subunit a 40-kDa beta (β) subunit, and a 6-kDa gamma (γ) subunit. Most insects express three isotypes of the β subunit, each being expressed in a tissue and cell-type dependent manner. The α subunit has 8 transmembrane domains whereas the β and γ subunits have just one. The α subunit mediates ATPase and ion transporting activities and together with the γ subunit comprises the site for cardiac glycoside (ouabain) binding. The β subunit is required for detectable pump activity, and is thought to have roles in stability, localization, and determining cation specificity. As such, a flea NKAB protein of the present invention represents a novel target for anti-flea vaccines and chemotherapeutic drugs.

[0020] Ligand-gated ion channel family proteins have been shown to transmit neural signals in response to binding neurotransmitters such as GABA, glycine, and glutamate. GABA and glycine receptors transmit inhibitory signals whereas glutamate receptors transmit excitatory signals. This family of proteins is the target for many drugs affecting neural signaling, and also for several families of insecticides including cyclodienes, pyrethroids, and phenyl pyrazoles. Northern blot analysis indicates that the mRNA corresponding to a LGIC nucleic acid molecule of the present invention is only expressed in HMT tissue, which suggests a role in the regulation or mediation of diuresis. Without being bound by theory, assuming protein expression correlates with the mRNA expression, flea LGIC may represent the first of this family of receptors shown to be exclusively expressed in renal tissue. Sequence analysis shows that a flea LGIC protein is distinct from other subfamilies of ligand-gated ion channels, and thus may represent a new subfamily. As such, a flea LGIC protein of the present invention represents a novel target for anti-flea vaccines and chemotherapeutic drugs.

[0021] The function of ANON/23DA protein largely unknown. The ANON/23DA gene is reported to be linked to the MAD gene in Drosophila, though it is not known if ANON/23DA and MAD are functionally related. ANON/23DA may also have functional similarity to human probable membrane receptor protein pHPS1-2, which is similar to rhodopsin/beta-adrenergic receptor which plays an important role in kidney function. As such, a flea ANON/23DA protein of the present invention represents a novel target for anti-flea vaccines and chemotherapeutic drugs.

[0022] Drosophila malvolio shows high sequence homology to mammalian natural resistance associated proteins (NRAMPs) and to yeast Smf1, which are proteins that transport divalent cations, specifically Mn++, Zn++, and Fe++. NRAMPs have also been shown be similar to ATPase transporters and use ATP as an energy source. There are two types of NRAMP proteins, NRAMP1 and NRAMP2. NRAMP1 is expressed exclusively on macrophages and is responsible for preventing intracellular replication of microbes. NRAMP2 is expressed in several cell and tissue types, including mouse intestinal epithelia. Flea malvolio proteins of the present invention appear to be most similar to NRAMP1. As such, a flea malvolio protein of the present invention represents a novel target for anti-flea vaccines and chemotherapeutic drugs.

[0023] The function of OS-D proteins is largely unknown. An OS-D nucleic acid molecule isolated from a Drosophila melanogaster antenna cDNA library encodes a protein that shares features common to vertebrate odorant-binding proteins, but has a primary structure unlike odorant-binding proteins. The encoded protein is also homologous to a family of soluble chemosensory proteins from the chemosensory organ of the desert locust, Schistocerca gregaria. As such, a flea OS-D protein of the present invention represents a novel target for anti-flea vaccines and chemotherapeutic drugs.

[0024] NMDA receptors are a subtype of glutamate-gated ion channels. All glutamate-gated ion channels transmit Na+ and K+ when stimulated, resulting in a depolarization of the membrane potential. NMDA receptors also transport Ca++ into cells upon stimulation, which distinguishes NMDA receptors from the other glutamate-gated ion channels. NMDA receptors play an important role in glutamate excitotoxicity, which has been linked to a number of neurodegenerative disorders such as focal cerebral ischemia (stroke), Parkinson's disease, Huntington's chorea, Alzheimer's disease, schizophrenia and epilepsy. It is thought that the Ca++ influx in open NMDA channels is the mediator for these diseases, since the increase in intracellular Ca++ concentration leads to the induction of metabolic changes in the cell, including the activation of Ca++ dependent proteases and production of free-oxygen radicals. As such, a flea NMDA protein of the present invention represents a novel target for anti-flea vaccines and chemotherapeutic drugs.

[0025] CLBP proteins of the present invention appear to fall into the family of PBP/GOBP proteins (pheromone binding protein/general odorant binding protein) based on sequence homology with members of this family (30% identity with PBPRP-2, pheromone binding protein related protein #2 of Drosophila melanogaster, and approximately the same identity with CSRLLBP, chemical sense related lipophilic ligand binding protein of Phormia regina). Without being bound by theory, it is believed that these proteins are involved in the perception of odors or pheromones, such as the ability to sense the presence of a host or mate. As such, a flea CLBP protein of the present invention represents a novel target for anti-flea vaccines and chemotherapeutic drugs.

[0026] Peritrophins, including flea PL2, PL3 and PL4 proteins of the present invention, are a family of putative chitin-binding proteins that comprise a structural component of the peritrophic matrix, an acellular membrane composed of proteins and sugars, most commonly chitin which forms a barrier between the contents of an ingested meal and the gut epithelia. Peritrophin-like proteins have also been shown to be present in the trachea of Drosophila embryos, indicating that such proteins may have additional roles outside the midgut. The function of the peritrophin-like proteins in adult fleas is not clear, since adult fleas do not produce a peritrophic matrix in the gut. Peritrophins have been investigated as targets for immunological control of hematophagous insects including the sheep blowfly, Lucilia cuprina. It has been shown in this insect that ingestion of antibodies against peritrophins inhibits the growth of larvae and can result in increased larval mortality. It has also been shown that the ingestion of antibodies against peritrophins reduces the permeability of the peritrophic matrix in L. cuprina larvae. This in turn may inhibit the movement of digested food across the peritrophic matrix to the gut epithelium, resulting in starvation. As such, a flea peritrophin of the present invention represents a novel target for anti-flea vaccines and chemotherapeutic drugs.

[0027] In general, voltage-gated chloride channels (VGCC) maintain resting epithelial and neural membrane potentials and prevent hyperexcitability (sustained contraction) in muscle cells. In Drosophila Malpighian tubules, the diuretic hormone leukokinin has been shown to stimulate voltage-gated chloride channels in the stellate cells by increasing intracellular calcium levels. The flea VGCC protein sequence of the present invention contains an EF-hand calcium binding motif indicating potential regulation by calcium ions, and thus a possible link to leukokinins and diuresis. Chloride channels are critical for diuresis since chloride is the primary anion driving diuresis and is required to help neutralize the sodium and potassium cations that are secreted into the lumen in response to diuretic peptide. The mRNA for the VGCC of the present invention has been shown to be HMT-specific in adult fleas, indicating a potential role in diuresis. As such, a flea VGCC of the present invention represents a novel target for anti-flea vaccines and chemotherapeutic drugs.

[0028] The CLIC family of chloride channels are voltage-gated chloride channels that are expressed on a variety of vesicles and are thought to act in concert with the V-ATPase pump to regulate the pH of the vesicle interior. Members of the CLIC family have also been shown to be expressed on the plasma membrane, again, in association with the V-ATPase pump. In humans, a homologous protein has been shown to be expressed on the plasma membrane in epithelial tissues, suggesting a possible role in transepithelial chloride transport and in cows, an antibody against a homologous channel has been shown to inhibit all chloride conductance in kidney microsomes. If the CLIC gene product is indeed involved in transepithelial chloride transport in HMT tissues, it likely plays a critical role in mediating diuresis. As such, a flea CLIC of the present invention represents a novel target for anti-flea vaccines and chemotherapeutic drugs.

[0029] The NAH exchanger uses the proton gradient in the lumen of the Malpighian tubule to power the transport of sodium ions across the apical membrane into the lumen. The transport of sodium ions across the Malpighian tubule epithelia is induced by diuretic peptide and is a critical step in the induction of diuresis. The Northern blot analysis described herein indicates that NAH mRNA is upregulated within 15 minutes of feeding in adults, which is consistent with a molecule having a role in diuresis. In many insects, sodium has been shown to be the principle ion driving diuresis. The NAH exchanger has been shown to be located on the apical membrane in the Malpighian tubules, but may also be located in the hindgut and rectum. If located in the hindgut and rectum, it could be accessible to antibody attack on either the basolateral or apical membranes. As such, a flea NAH of the present invention represents a novel target for anti-flea vaccines and chemotherapeutic drugs.

[0030] SVP proteins have structural and sequence conservation with a bacterial family of proton co-transporters, with the mammalian proton/glucose transporter, and with organic ion transporters. SVP has 12 putative transmembrane regions that arise from an internal duplication. In mammals, it is located on neural and endocrine vesicles and is thought to function in the uptake of neurotransmitters into vesicles utilizing the proton gradient. Neurotransmitters in turn regulate the activity the ion channels on these membranes. In the Malpighian tubules, the activity of the ion channels determines the rate of diuresis, or fluid secretion from the hemolymph into the lumen. Thus, inhibiting the transport of neurotransmitters in the HMT tissues may have significant effects on the functions of these tissues. As such, a flea SVP of the present invention represents a novel target for anti-flea vaccines and chemotherapeutic drugs.

[0031] The function of flea AUP proteins is largely unknown. C. felis AUP shares some homology to Drosophila melanogaster anoxia-regulated gene product fau. The Drosophila melanogaster fau gene has no homology to previously described database entries, but localizes to laminal and cortical neurons of the Drosophila CNS by in situ hybridization, and plays and important role in response to O2 deprivation as measured by impaired recovery time of transgenic flies over-expressing fau to anoxia. As such, a flea AUP of the present invention represents a novel target for anti-flea vaccines and chemotherapeutic drugs.

[0032] A flea 7B2 protein has some BLAST homology to the neuroendocrine protein 7B2 from various organisms, including Drosophila, C. elegans, the pond snail Lymnaea stagnalis, and humans. 7B2 has been implicated in activation of prohormone convertase 2 (PC2) an important neuroendocrine precursor processing endoprotease. Additionally, 7B2 was found to be critical in islet hormone processing in mice using null mutants which displayed hypoglycemia, hyperproinsulinemia and hypoglucagonemia. As such, a flea 7B2 of the present invention represents a novel target for anti-flea vaccines and chemotherapeutic drugs.

[0033] Flea allantoinase nucleic acid molecules of known length isolated from C. felis are denoted “nCfALN_{#}”, for example nCfALN₂₀₅₇, wherein “#” refers to the number of nucleotides in that molecule, and allantoinase proteins of known length are denoted “PCfALN_{#}” (for example PCfALN₃₈₄) wherein “#” refers to the number of amino acid residues in that molecule. Similarly, C. felis CBP nucleic acid molecules and proteins of known length are denoted “nCfCBP_{#}” and “PCfCBP_{#}”, respectively; C. felis NKAB nucleic acid molecules and proteins of known length are denoted “nCfNKAB_{#}” and “PCfNKAB_{#}”, respectively; C. felis LGIC nucleic acid molecules and proteins of known length are denoted “nCfLGIC_{#}” and “PCftGIC_{#}”, respectively; C. felis ANON nucleic acid molecules and proteins of known length are denoted “nCfANON_{#}” and “PCfANON_{#}”, respectively; C. felis MALV nucleic acid molecules and proteins of known length are denoted “nCfMALV_{#}” and “PCfMALV_{#}” respectively; C. felis OS-D nucleic acid molecules and proteins of known length are denoted “nCfOSD_{#}” and “PCFOSD_{#} respectively; C. felis NMDA nucleic acid molecules and proteins of known length are denoted “nCfNMDA_{#}” and “PCfNMDA_{#} respectively; C. felis CLBP nucleic acid molecules and proteins of known length are denoted “nCfCLBP_{#}” and “PCfCLBP_{#} respectively, C. felis NAH nucleic acid molecules and proteins of known length are denoted “nCf NAH_{#}” and “PCf NAH_{#} respectively, C. felis CLIC nucleic acid molecules and proteins of known length are denoted “nCfCLIC_{#}” and “PCfCLIC_{#} respectively, C. felis PL2 nucleic acid molecules and proteins of known length are denoted “nCfPL2_{#}” and “PCfPL2_{#} respectively, C. felis PL3 nucleic acid molecules and proteins of known length are denoted “nCfPL3_{#}” and “PCfPL3_{#} respectively, C. felis PL4 nucleic acid molecules and proteins of known length are denoted “nCfPL4_{#}” and “PCfPL4_{#} respectively, C. felis SVP nucleic acid molecules and proteins of known length are denoted “nCfSVP_{#}” and “PCfSVP_{#} respectively, C. felis VGCC nucleic acid molecules and proteins of known length are denoted “nCfVGCC_{#}” and “PCFVGCC_{#} respectively, C. felis AUP nucleic acid molecules and proteins of known length are denoted “nCAUP f_{#}” and “PCfAUP_{#} respectively, and C. felis 7B2 nucleic acid molecules and proteins of known length are denoted “nCf7B2_{#}” and “PCf7B2_{#} respectively.

[0034] The present invention also provides for HMT and HNC DNA molecules that are specific tags for messenger RNA molecules derived from HMT and HNC tissues. Such DNA molecules can correspond to an entire or partial sequence of a messenger RNA, and therefore, a DNA molecule corresponding to such a messenger RNA molecule (i.e. a cDNA molecule), can encode a full-length or partial-length protein. A nucleic acid molecule encoding a partial-length protein can be used directly as a probe or indirectly to generate primers to identify and/or isolate a cDNA nucleic acid molecule encoding a corresponding, or structurally related, full-length protein. Such a partial cDNA nucleic acid molecule can also be used in a similar manner to identify a genomic nucleic acid molecule, such as a nucleic acid molecule that contains the complete gene including regulatory regions, exons and introns. Methods for using partial HMT and HNC cDNA molecules and sequences to isolate full-length transcripts and corresponding cDNA molecules are described in the examples herein below.

[0035] The proteins and nucleic acid molecules of the present invention can be obtained from their natural source, or can be produced using, for example, recombinant nucleic acid technology or chemical synthesis. Also included in the present invention is the use of these proteins and nucleic acid molecules as well as antibodies and inhibitory compounds thereto as therapeutic compositions to protect animals from flea infestation as well as in other applications, such as those disclosed below.

[0036] Flea HMT and HNC proteins and nucleic acid molecules of the present invention have utility because they represent novel targets for anti-arthropod vaccines and chemotherapeutic drugs. The products and processes of the present invention are advantageous because they enable the inhibition of arthropod development, metamorphosis, feeding, digestion and/or reproduction processes that involve HMT and/or HNC proteins.

[0037] The head and nerve cord of the flea, including antennae, brain, corpora cardiacum, corpora allata, and subesophageal and abdominal ganglion tissues are of interest as such tissues are highly enriched for transcripts that encode neuronal and endocrine targets, as well as targets involved in chemosensory and mechanosensory reception. By sequencing cDNA fragments from a library enriched in flea head and nerve cord nucleic acid sequences (referred to herein as HNC nucleic acid sequences), genes, and their respective full-length coding regions, integrally involved with flea neuronal and endocrine function are identified. Once identified, these genes can be further characterized and specific interference strategies are designed. As such, flea HNC proteins and nucleic acid molecules of the present invention have utility because they represent novel targets for anti-arthropod vaccines and chemotherapeutic drugs.

[0038] Blood-feeding insects such as fleas ingest large quantities of blood relative to their body weight and, as such, are adapted to reduce the volume of the ingested blood meal through the rapid elimination of water. In addition, the concentrations of sodium, potassium, and chloride ions in the blood meal are greater than in the hemolymph of fleas, necessitating the excretion of excessive amounts of these ions. The active transport of these ions from the hemolymph into the lumens of the Malpighian tubules and the hindgut drives the passive transport of water and other hemolymph contents into these organs as well. While passing through these organs, waste products from the hemolymph are excreted and needed nutrients, water, and salts are reabsorbed. As such, interfering with these essential processes is an important strategy for developing a product for controlling flea populations. By sequencing cDNA fragments from a library enriched in hindgut and Malpighian tubule nucleic acid sequences (referred to herein as HMT nucleic acid sequences), genes integrally involved with these processes, and their respective full-length coding regions, are identified. Once identified, these genes are further characterized and specific interference strategies can be designed. As such, flea HMT proteins and nucleic acid molecules of the present invention have utility because they represent novel targets for anti-arthropod vaccines and chemotherapeutic drugs.

[0039] One embodiment of the present invention is an isolated protein that includes a flea HMT and/or HNC protein. It is to be noted that the term “a” or “an” entity refers to one or more of that entity; for example, a protein, a nucleic acid molecule, an antibody and a therapeutic composition refers to “one or more” or “at least one” protein, nucleic acid molecule, antibody and therapeutic composition respectively. As such, the terms “a” (or “an”), “one or more” and “at least one” can be used interchangeably herein. It is also to be noted that the terms “comprising”, “including”, and “having” can be used interchangeably. According to the present invention, an isolated, or biologically pure, protein, is a protein that has been removed from its natural milieu. As such, “isolated” and “biologically pure” do not necessarily reflect the extent to which the protein has been purified. An isolated protein of the present invention can be obtained from its natural source, can be produced using recombinant DNA technology, or can be produced by chemical synthesis.

[0040] As used herein, isolated flea HMT and/or HNC proteins of the present invention can be full-length proteins or any homologue of such proteins. An isolated protein of the present invention, including a homologue, can be identified in a straight-forward manner by the protein's ability to elicit an immune response against a flea HMT and/or HNC protein or by the protein's HMT and/or HNC activity. Examples of flea HMT and HNC homologue proteins include flea HMT and HNC proteins in which amino acids have been deleted (e.g., a truncated version of the protein, such as a peptide), inserted, inverted, substituted and/or derivatized (e.g., by glycosylation, phosphorylation, acetylation, myristoylation, prenylation, palmitoylation, amidation and/or addition of glycerophosphatidyl inositol) such that the homologue includes at least one epitope capable of eliciting an immune response against a flea HMT or HNC protein, and/or of binding to an antibody directed against a flea HMT or HNC protein. That is, when the homologue is administered to an animal as an immunogen, using techniques known to those skilled in the art, the animal will produce an immune response against at least one epitope of a natural flea HMT or HNC protein. The ability of a protein to effect an immune response can be measured using techniques known to those skilled in the art. As used herein, the term “epitope” refers to the smallest portion of a protein or other antigen capable of selectively binding to the antigen binding site of an antibody or a T cell receptor. It is well accepted by those skilled in the art that the minimal size of a protein epitope is about four to six amino acids. As is appreciated by those skilled in the art, an epitope can include amino acids that naturally are contiguous to each other as well as amino acids that, due to the tertiary structure of the natural protein, are in sufficiently close proximity to form an epitope. According to the present invention, an epitope includes a portion of a protein comprising at least about 4 amino acids, at least about 5 amino acids, at least about 6 amino acids, at least about 10 amino acids, at least about 15 amino acids, at least about 20 amino acids, at least about 25 amino acids, at least about 30 amino acids, at least about 35 amino acids, at least about 40 amino acids or at least about 50 amino acids in length.

[0041] In one embodiment of the present invention a flea homologue protein has HMT or HNC activity, i.e. the homologue exhibits an activity similar to its natural counterpart. Examples of such activities are disclosed herein; e.g., all. Methods to detect and measure such activities are known to those skilled in the art. Examples of such activities are disclosed herein; e.g. allantoinase, chitin-binding protein, sodium/potassium ATPase, ligand-gated chloride channel, ANON/23DA, malvolio, odorant binding protein-like protein, N-methyl-D-aspartate receptor associated protein, chemical sense related lipophilic ligand binding protein, Sodium/Hydrogen Transporter-like protein, a Chloride Intracellular Channel-like protein, aperitrophin-like protein, aPeritrophin-like protein, aperitrophin-like protein, a synaptic vesicle 2B-like protein, a voltage-gated Chloride-like protein, an anoxia upregulated protein-like protein, and a neuroendocrine specific 7B2-like protein.

[0042] Flea HMT and/or HNC homologue proteins can be the result of natural allelic variation or natural mutation. Flea HMT and/or HNC protein homologues of the present invention can also be produced using techniques known in the art including, but not limited to, direct modifications to the protein or modifications to the gene encoding the protein using, for example, classic or recombinant DNA techniques to effect random or targeted mutagenesis.

[0043] Flea HMT and HNC proteins of the present invention are encoded by flea HMT and HNC nucleic acid molecules, respectively. As used herein, flea HMT and HNC nucleic acid molecules include nucleic acid sequences related to natural flea HMT and HNC genes, and, preferably, to Ctenocephalides felis HMT and HNC genes. As used herein, flea HMT and HNC genes include all regions such as regulatory regions that control production of flea HMT and HNC proteins encoded by such genes (such as, but not limited to, transcription, translation or post-translation control regions) as well as the coding region itself, and any introns or non-translated coding regions. As used herein, a nucleic acid molecule that “includes” or “comprises” a sequence may include that sequence in one contiguous array, or may include the sequence as fragmented exons such as is often found for a flea gene. As used herein, the term “coding region” refers to a continuous linear array of nucleotides that translates into a protein. A full-length coding region is that coding region that is translated into a full-length, i.e., a complete protein as would be initially translated in its natural milieu, prior to any post-translational modifications.

[0044] One embodiment of the present invention is a C. felis ALN gene that includes the nucleic acid sequence SEQ ID NO:1 and/or SEQ ID NO:4, a C. felis CBP gene that includes the nucleic acid sequence SEQ ID NO:7 and/or SEQ ID NO:10, a C. felis NKAB gene that includes the nucleic acid sequence SEQ ID NO:13 and/or SEQ ID NO:16, a C. felis LGIC gene that includes the nucleic acid sequence SEQ ID NO:19, SEQ ID NO:22, SEQ ID NO:1861, and/or SEQ ID NO:1864, a C. felis ANON gene that includes the nucleic acid sequence SEQ ID NO:25 and/or SEQ ID NO:28, a C. felis MALV gene that includes the nucleic acid sequence SEQ ID NO: 31 and/or SEQ ID NO:34, a C. felis OS-D gene that includes the nucleic acid sequence SEQ ID NO:37 and/or SEQ ID NO:40, a C. felis NMDA gene that includes the nucleic acid sequence SEQ ID NO: 43 and/or SEQ ID NO:46, a C. felis CLBP gene that includes the nucleic acid sequence SEQ ID NO:153, SEQ ID NO:156, SEQ ID NO:159, SEQ ID NO:162, SEQ ID NO:165, and/or SEQ ID NO:168, a C. felis NAH gene that includes the nucleic acid sequence SEQ ID NO:1867 and/or SEQ ID NO:1870, a C. felis CLIC gene that includes the nucleic acid sequence SEQ ID NO:1872 and/or SEQ ID NO:1875, a C. felis PL2 gene that includes the nucleic acid sequence SEQ ID NO:1877, SEQ ID NO:1878, SEQ ID NO:1880, SEQ ID NO:1882 and/or SEQ ID NO:1885, a C. felis PL3 gene that includes the nucleic acid sequence SEQ ID NO:1887 and/or SEQ ID NO:1890, a C. felis PL4 gene that includes the nucleic acid sequence SEQ ID NO:1896 and/or SEQ ID NO:1899, a C. felis SVP gene that includes the nucleic acid sequence SEQ ID NO:1901 and/or SEQ ID NO:1904, a C. felis VGCC gene that includes the nucleic acid sequence SEQ ID NO:1914 and/or SEQ ID NO:1917, a C. felis AUP gene that includes the nucleic acid sequence SEQ ID NO:1919 and/or SEQ ID NO:1922, a C felis 7B2 gene that includes the nucleic acid sequence SEQ ID NO:1924 and/or SEQ ID NO:1927, a C. felis gene that includes a nucleic acid sequence of Table I, Table II, Table III and/or Table IV; as well as the complements of any of these nucleic acid sequences. These nucleic acid sequences are further described herein. For example, nucleic acid sequence SEQ ID NO:1 represents the deduced sequence of the coding strand of a C. felis cDNA denoted herein as C. felis ALN nucleic acid molecule nCfALN₂₀₅₇, the production of which is disclosed in the Examples. Nucleic acid molecule SEQ ID NO:1 comprises an apparently full-length coding region. The complement of SEQ ID NO:1 (represented herein by SEQ ID NO:3) refers to the nucleic acid sequence of the strand fully complementary to the strand having SEQ ID NO:1, which can easily be determined by those skilled in the art. Likewise, a nucleic acid sequence complement of any nucleic acid sequence of the present invention refers to the nucleic acid sequence of the nucleic acid strand that is fully complementary to (i.e., can form a complete double helix with) the strand for which the sequence is cited. For example, the complements of SEQ ID NOs: 4, 7, 10, 13, 16, 19, 22, 25, 28, 31, 34, 37, 40, 43, 46, 153, 156, 159, 162, 165, and 168 are SEQ ID NOs: 6, 9, 12, 15, 18, 21, 24, 27, 30, 33, 36, 39, 42, 45, 48, 155, 158, 161, 164, 167, and 170, respectively. It should be noted that since nucleic acid sequencing technology is not entirely error-free, SEQ ID NO:1 (as well as other nucleic acid and protein sequences presented herein) represents an apparent nucleic acid sequence of the nucleic acid molecule encoding an ALN protein of the present invention.

[0045] Translation of SEQ ID NO:1, the coding strand of nCfALN₂₀₅₇, as well as translation of SEQ ID NO:4, the coding strand of nCfALN₁₁₅₂, which represents the coding region of SEQ ID NO:1, each yields a protein of about 384 amino acids, denoted herein as PCfALN₃₈₄, the amino acid sequence of which is presented in SEQ ID NO:2, assuming a first in-frame codon extending from nucleotide 1 to nucleotide 3 of SEQ ID NO:4.

[0046] Translation of SEQ ID NO:7, the coding strand of nCfCBP₁₁₂₈, as well as translation of SEQ ID NO:10, the coding strand of nCfCBP₁₁₂₈, which represents the coding region of SEQ ID NO:7, each yields a protein of about 272 amino acids, denoted herein as PCfCBP₂₇₂, the amino acid sequence of which is presented in SEQ ID NO:8, assuming a first in-frame codon extending from nucleotide 1 to nucleotide 3 of SEQ ID NO:10.

[0047] Translation of SEQ ID NO:13, the coding strand of nCfNKAB₁₇₁₄, as well as translation of SEQ ID NO:16, the coding strand of nCfNKAB₉₇₃, which represents the coding region of SEQ ID NO:13, each yields a protein of about 326 amino acids, denoted herein as PCfNKAB₃₂₆, the amino acid sequence of which is presented in SEQ ID NO:14, assuming a first in-frame codon extending from nucleotide 1 to nucleotide 3 of SEQ ID NO:16.

[0048] Translation of SEQ ID NO:19, the coding strand of nCfLGIC₂₂₄₀, as well as translation of SEQ ID NO:22, the coding strand of nCfLGIC₁₇₀₇ which represents the coding region of SEQ ID NO:19, each yields a protein of about 569 amino acids, denoted herein as PCfLGIC₅₆₉, the amino acid sequence of which is presented in SEQ ID NO:20, assuming a first in-frame codon extending from nucleotide 1 to nucleotide 3 of SEQ ID NO:22.

[0049] Translation of SEQ ID NO:25, the coding strand of nCfANON₁₄₂₉, as well as translation of SEQ ID NO:28, the coding strand of nCfANON₁₁₉₄, which represents the coding region of SEQ ID NO:25, each yields a protein of about 398 amino acids, denoted herein as PCfANON₃₉₈, the amino acid sequence of which is presented in SEQ ID NO:26, assuming a first in-frame codon extending from nucleotide 1 to nucleotide 3 of SEQ ID NO:28.

[0050] Translation of SEQ ID NO:31, the coding strand of nCfNALV₇₆₅, as well as translation of SEQ ID NO:34, the coding strand of nCfMALV₇₆₂, which represents the coding region of SEQ ID NO:31, each yields a protein of about 327 amino acids, denoted herein as PCfMALV₂₅₄, the amino acid sequence of which is presented in SEQ ID NO:32, assuming a first in-frame codon extending from nucleotide 1 to nucleotide 3 of SEQ ID NO:34.

[0051] Translation of SEQ ID NO:37, the coding strand of nCfOSD₆₀₄, as well as translation of SEQ ID NO:40, the coding strand of nCfOSD₄₀₅, which represents the coding region of SEQ ID NO:37, each yields a protein of about 135 amino acids, denoted herein as PCfOSD₁₃₅, the amino acid sequence of which is presented in SEQ ID NO:38, assuming a first in-frame codon extending from nucleotide 1 to nucleotide 3 of SEQ ID NO:40.

[0052] Translation of SEQ ID NO:43, the coding strand ofNMDA₁₂₂₇, as well as translation of SEQ ID NO:46, the coding strand of nCfNMDA₇₃₈, which represents the coding region of SEQ ID NO:43, each yields a protein of about 246 amino acids, denoted herein as PCfNMDA₂₄₆, the amino acid sequence of which is presented in SEQ ID NO:44, assuming a first in-frame codon extending from nucleotide 1 to nucleotide 3 of SEQ ID NO:46.

[0053] Translation of SEQ ID NO:153, the coding strand of nCfCLBP1A₆₃₃, as well as translation of SEQ ID NO:156, the coding strand of nCfCLBP1A₄₄₁, which represents the coding region of SEQ ID NO:153, each yields a protein of about 147 amino acids, denoted herein as PCfCLBP₁₄₇, the amino acid sequence of which is presented in SEQ ID NO:154, assuming a first in-frame codon extending from nucleotide 1 to nucleotide 3 of SEQ ID NO:156.

[0054] Translation of SEQ ID NO:162, the coding strand of nCfCLBP2A₆₃₁, as well as translation of SEQ ID NO:165, the coding strand of nCfCLBP2A₄₄₁, which represents the coding region of SEQ ID NO:162, each yields a protein of about 147 amino acids, denoted herein as PCfCLBP2A₁₄₇, the amino acid sequence of which is presented in SEQ ID NO:163, assuming a first in-frame codon extending from nucleotide 1 to nucleotide 3 of SEQ ID NO:165.

[0055] Translation of SEQ ID NO:1861, the coding strand of nCfLGIC₂₇₃₉, as well as translation of SEQ ID NO:1864, the coding strand of nCfLGIC₂₀₁₆, which represents the coding region of SEQ ID NO:1861, each yields a protein of about 672 amino acids, denoted herein as PCfLGIC₆₇₂, the amino acid sequence of which is presented in SEQ ID NO:1862, assuming a first in-frame codon extending from nucleotide 1 to nucleotide 3 of SEQ ID NO:1864.

[0056] Translation of SEQ ID NO:1867, the coding strand of nCfNAH₂₀₈₀, as well as translation of SEQ ID NO:1870, the coding strand of nCfNAH₁₈₂₄, which represents the coding region of SEQ ID NO:1867, each yields a protein of about 608 amino acids, denoted herein as PCfNAH₆₀₈, the amino acid sequence of which is presented in SEQ ID NO:1868, assuming a first in-frame codon extending from nucleotide 1 to nucleotide 3 of SEQ ID NO:1870.

[0057] Translation of SEQ ID NO:1872, the coding strand of nCfCLIC₂₂₈₃, as well as translation of SEQ ID NO:1875, the coding strand of nCfCLIC₇₈₆, which represents the coding region of SEQ ID NO:1872, each yields a protein of about 262 amino acids, denoted herein as PCfCLIC₂₆₂, the amino acid sequence of which is presented in SEQ ID NO:1873, assuming a first in-frame codon extending from nucleotide 1 to nucleotide 3 of SEQ ID NO:1875.

[0058] Translation of SEQ ID NO:1882, the coding strand of nCfPL2₁₄₇1, as well as translation of SEQ ID NO:1885, the coding strand of nCfPL2₁₃₅₉, which represents the coding region of SEQ ID NO:1882, each yields a protein of about 453 amino acids, denoted herein as PCfPL2₄₅₃, the amino acid sequence of which is presented in SEQ ID NO:1883, assuming a first in-frame codon extending from nucleotide 1 to nucleotide 3 of SEQ ID NO:1885.

[0059] Translation of SEQ ID NO:1887, the coding strand of nCfPL3₄₀₆, as well as translation of SEQ ID NO:1890, the coding strand of nCfPL3₂₄₃, which represents the coding region of SEQ ID NO:1887, each yields a protein of about 81 amino acids, denoted herein as PCfPL3₈₁ the amino acid sequence of which is presented in SEQ ID NO:1888, assuming a first in-frame codon extending from nucleotide 1 to nucleotide 3 of SEQ ID NO:1890.

[0060] Translation of SEQ ID NO:1896, the coding strand of nCfPL4₁₀₆₂, as well as translation of SEQ ID NO:1899, the coding strand of nCfPL4₈₅₅, which represents the coding region of SEQ ID NO:1896, each yields a protein of about 285 amino acids, denoted herein as PCfPL4₂₈₅, the amino acid sequence of which is presented in SEQ ID NO:1897, assuming a first in-frame codon extending from nucleotide 1 to nucleotide 3 of SEQ ID NO:1899.

[0061] Translation of SEQ ID NO:1901, the coding strand of nCfSVP₁₈₇₅, as well as translation of SEQ ID NO:1904, the coding strand of nCfSVP₁₅₉₀, which represents the coding region of SEQ ID NO:1901, each yields a protein of about 530 amino acids, denoted herein as PCfSVP₅₃₀, the amino acid sequence of which is presented in SEQ ID NO:1902, assuming a first in-frame codon extending from nucleotide 1 to nucleotide 3 of SEQ ID NO:1904.

[0062] Translation of SEQ ID NO:1914, the coding strand of nCfVGCC₃₁₂₆, as well as translation of SEQ ID NO:1917, the coding strand of nCfVGCC₂₅₅₃, which represents the coding region of SEQ ID NO:1914, each yields a protein of about 851 amino acids, denoted herein as PCfVGCC₈₅₁, the amino acid sequence of which is presented in SEQ ID NO:1915, assuming a first in-frame codon extending from nucleotide 1 to nucleotide 3 of SEQ ID NO:1917.

[0063] Translation of SEQ ID NO:1919, the coding strand of nCfAUP₁₁₈₁, as well as translation of SEQ ID NO:1922, the coding strand of nCfAUP₃₀₆, which represents the coding region of SEQ ID NO:1919, each yields a protein of about 102 amino acids, denoted herein as PCfAUP₁₀₂, the amino acid sequence of which is presented in SEQ ID NO:1920, assuming a first in-frame codon extending from nucleotide 1 to nucleotide 3 of SEQ ID NO:1922.

[0064] Translation of SEQ ID NO:1924, the coding strand of nCf7B2₂₁₆₁, as well as translation of SEQ ID NO:1927, the coding strand of nCf7B2₈₀₁, which represents the coding region of SEQ ID NO:1924, each yields a protein of about 267 amino acids, denoted herein as PCf7B2₂₆₇, the amino acid sequence of which is presented in SEQ ID NO:1925, assuming a first in-frame codon extending from nucleotide 1 to nucleotide 3 of SEQ ID NO:1927.

[0065] Table I represents a variety of flea HNC nucleic acid molecules of the present invention. Also cited in Table I are nucleic acid molecules from other organisms which share the closest sequence identity with the cited HNC sequences of the present invention, as determined by submitting each HNC sequence for a search through the National Center for Biotechnology Information (NCBI), National Library of Medicine, National Institute of Health, Baltimore, Md., using the BLAST network. This database includes SwissProt+PIR+SPupdate+GenPept+GPUpdate+PDB databases. The search was conducted using the xBLAST function using default parameters.

TABLE I

| SEQ ID NO: | Name | Genbank Homology | Organism |
|---|---|---|---|
| 63 | 2096-46 | ATPase 6 | D. melanogaster |
| 64 | 2098-25 | ATP synthase delta chain | Sus scrofa |
| 65 | 2098-34 | F1-ATPase epsilon-subunit | Ipomoea batatas |
| 66 | 2110-19 | ATP synthase beta subunit | Drosophila pseudoobscura |
| 67 | 2113-15 | ATP synthase delta chain, | Sus scrofa |
| 68 | 2180-31 | ATP synthase alpha subunit precursor | Rattus rattus |
| 69 | 2224-50 | oligomysin sensitivity conferring protein | D. melanogaster |
| 70 | 2116-51 | cysteine dioxygenase | Homo sapiens |
| 71 | 2116-55 | pyrroline-5-carboxylate | Homo sapiens |
| | | dehydrogenase (P5CDh) | |
| 72 | 2124-17 | AMP deaminase | Homo sapiens |
| 73 | 2138-38 | ubiquitin | Mus musculus |
| 74 | 2184-59 | manganese superoxide dismutase | Homo sapiens |
| 75 | 2096-24 | muscle LIM protein 1 | D. melanogaster |
| 76 | 2140-53 | F25H5.1a | C. elegans |
| 77 | 2176-41 | Frazzled | D. melanogaster |
| 78 | 2223-11 | LIMm domain-containing protein | C. elegans |
| 79 | 2223-53 | deleted in split hand/split foot 1 (DSS1) | Homo sapiens |
| 80 | 2225-28 | stranded-at-second | D. melanogaster |
| 81 | 2099-61 | histone H3 | Spisula solidissima |
| 82 | 2114-21 | STE12 | S. cereviciae |
| 83 | 2117-4 | Rad51 homolog | Bombyx mori |
| 84 | 2138-46 | heat shock protein p27 | D. immitis |
| 85 | 2182-37 | heat shock protein 70 | D. immitis |
| 86 | 2211-32 | BTB-II protein domain gene | D. melanogaster |
| 87 | 2223-7 | heat shock protein | D. melanogaster |
| 88 | 2224-17 | heat shock protein 86 | Home sapiens |
| 89 | 2225-16 | POU domain protein | D. melanogaster |
| 90 | 2225-18 | nucleolin | Xenopus laevis |
| 91 | 2212-85 | thyroid hormone receptor-associated | Homo sapiens |
| | | protein complex component TRAP220 | |
| 92 | 2211-21 | T03D8.3 | C. elegans |
| 93 | 2223-67 | hepatoma derived growth factor (HDGF) | Mus musculus |
| 94 | 2225-61 | tyrosine hydroxylase type 1 (neuronal | D. melanogaster |
| | | form) | |
| 95 | 2097-7 | sarco/endoplasmic reticulum-type | D. melanogaster |
| | | Ca-2+-ATPase | |
| 96 | 2098-27 | calcium-transporting ATPase | D. melanogaster |
| 97 | 2099-19 | calcium channel alpha-1 subunit | Aplysia californica |
| 98 | 2120-5 | P-type voltage-gated calcium channel | Homo sapiens |
| | | alpha 1 subunit homolog | |
| 99 | 2124-2 | sarco/endoplasmic reticulum | Procambarus clarkii |
| | | Ca2+-ATPase (SERCA) | |
| 100 | 2182-43 | sulfonylurea receptor 2b | Mus musculus |
| 101 | 2223-18 | Sodium-Potassium-Chloride cotransporter | D. melanogaster |
| 102 | 2223-63 | sarco/endoplasmic reticulum-type | D. melanogaster |
| | | Ca2(+)-ATPase | |
| 103 | 2224-13 | similar to ABC transporters | C. elegans |
| 104 | 2098-3 | Camguk | D. melanogaster |
| 105 | 2101-9 | UNC-89 | C. elegans |
| 106 | 2132-31 | arginine kinase | Homarus gammarus |
| 107 | 2141-51 | casein kinase-II beta | Oryctolagus cuniculus |
| 108 | 2178-18 | diacylglycerol kinase eta | Cricetinae |
| 109 | 2180-32 | retinoid- and fatty acid-binding | D. melanogaser |
| | | glycoprotein | |
| 110 | 2137-23 | vitellogenin | Aedes aegypti |
| 111 | 2144-14 | nuclear localization signal spot 1 | Mus musculus |
| 112 | 2212-13 | putative n-terminal acetyltransferase | S. cereviciae |
| 113 | 2212-27 | clathrin associated protein AP47 | Drosophila grimshawi |
| 114 | 2223-28 | O1 chloroquine-resistance protein | Plasmodium falciparans |
| 115 | 2224-14 | vitellogenin | Athalia rosae |
| 116 | 2224-15 | antigen NY-CO-3 | Homo sapiens |
| 117 | 2225-24 | carbonic anhydrase | C. elegans |
| 118 | 2225-58 | yk500f6.3 | C. elegans |
| 119 | 2225-76 | unknown | Homo sapiens |
| 120 | 2224-86 | BmP109 (cerebroside sulfate activator | Bombyx mori |
| | | protein family) | |
| 121 | 2225-23 | intersectin | Homo sapiens |
| 122 | 2170-16 | chemical-sense-related | Phormia regina |
| | | lipophilic-ligand-binding protein | |
| 123 | 2176-2 | olfactory receptor protein 2.4 | Danio rerio |
| 124 | 2212-63 | olfactory receptor | Xenopus laevis |
| 125 | 2224-77 | inner mitochondrial membrane | Homo sapiens |
| | | translocase Tim23 | |
| 126 | 2225-12 | sodium-dependent multi-vitamin | Rattus norvegicus |
| | | transporter | |
| 127 | 2225-42 | ribophorin I | Rattus norvegicus |
| 128 | 2101-59 | phosphate carrier protein | C. elegans |
| 129 | 2132-38 | proteinase inhibitor | Locusta migratoria |
| 130 | 2174-72 | HE4 protein | Homo sapiens |
| 131 | 2211-48 | spermatogenic cell/sperm-associated | Rattus norvegicus |
| | | Tat-binding homologue | |
| 132 | 2110-23 | Gcap1 gene product | Mus musculus |
| 133 | 2116-64 | toll protein | D. melanogaster |
| 134 | 2124-3 | tuberin (TSC2) gene | Homo sapiens |
| 135 | 2178-55 | RAS-like protein | Gallus gallus |
| 136 | 2223-35 | Rho1 gene product | D. melanogaster |
| 137 | 2224-82 | paxillin | Homo sapiens |
| 138 | 2225-44 | adenylyl cyclase-associated protein (CAP) | Homo sapiens |
| 139 | 2225-80 | adenylate kinase | Gallus gallus |
| 140 | 2110-52 | hydroxyproline-rich glycoprotein | Phaseolus vulgaris |
| 141 | 2115-49 | mitogen inducible gene mig-2 | Homo sapiens |
| 142 | 2116-5 | F52H3.5 | C. elegans |
| 143 | 2172-89 | 12D3 antigen | Babesia bovis |
| 144 | 2178-20 | frameshift | P. falciparum |
| 145 | 2178-81 | KIAA0066 | Homo sapeins |
| 146 | 2182-16 | Y57G11C.4 | C. elegans |
| 147 | 2182-53 | C16C10.5 | C. elegans |
| 148 | 2211-8 | Unknown | Homo sapeins |
| 149 | 2211-31 | hopothetical protein | Arabidopsis thaliana |
| 150 | 2223-54 | ORF YNL207w | S. cereviciae |
| 151 | 2224-94 | 14.3 kDa perchloric acid soluble protein | Capra hircus |
| 152 | 2225-36 | EST clone | C. elegans |
| 1719 | 2228-2 | BIGH3 | H. sapiens |
| 1720 | 2228-5 | H protein | H. sapiens |
| 1721 | 2228-8 | ubiquinol-cytochrome c reductase | Schizosaccharomyces |
| | | | pombe |
| 1722 | 2228-11 | similar to mitochondrial ATPase inhibitors | C. elegans |
| 1723 | 2228-16 | Putative enzyme | E. coli |
| 1724 | 2228-18 | Ribosomal protein L7A | Drosophila |
| 1725 | 2228-22 | Troponin-I wings up A | Drosophila |
| 1726 | 2228-25 | tls gene product | E. coli |
| 1727 | 2228-27 | YCR521 gene product | Saccharomyces cerevisiae |
| 1728 | 2228-28 | putative transport system permease | E. coli |
| | | protein | |
| 1729 | 2228-32 | SapA protein | E. coli |
| 1730 | 2228-34 | Putative protein | Arabidopsis thaliana |
| 1731 | 2228-37 | Ada | E. coli |
| 1732 | 2228-39 | Titin | H. sapiens |
| 1733 | 2228-42 | adenylosuccinate synthetase | Mus musculus |
| 1734 | 2228-43 | transfer RNA-Ala synthetase | B. mori |
| 1735 | 2228-44 | C4 zinc finger DNA-binding protein | Drosophila |
| 1736 | 2228-48 | heme A: farnesyltransferase | H. sapiens |
| 1737 | 2228-51 | URF 4L (aa 1-96) | Drosophila |
| 1738 | 2228-53 | DOLICHOL-PHOSPHATE | E. coli |
| | | MANNOSYLTRANSFERASE | |
| 1739 | 2228-58 | troponin-T | Drosophila |
| 1740 | 2228-59 | protein disulfide isomerase | Drosophila |
| 1741 | 2228-63 | orf, hypothetical protein | E. coli |
| 1742 | 2228-66 | ilvl polypeptide | E. coli |
| 1743 | 2228-68 | orf, hypothetical protein | E. coli |
| 1744 | 2228-72 | Respiratory nitrate reductase 1 alpha | E. coli |
| | | chain | |
| 1745 | 2228-77 | homolog of virulence factor | E. coli |
| 1746 | 2228-84 | ORF o164 | E. coli |
| 1747 | 2228-91 | nuclear protein E3-3 orf1 | Rattus norvegicus |
| 1748 | 2245-66 | Troponin C | Drosophila |
| 1749 | 2245-70 | Predicted secreted protein | Plasmodium falciparum |
| 1750 | 2245-72 | Cytochrome C-1 | H. sapiens |
| 1751 | 2245-75 | rpoB | Plasmodium falciparum |
| 1752 | 2245-78 | sarco(endo)plasmic reticulum-type | Helliothis virescens |
| | | calcium ATPase | |
| 1753 | 2246-31 | Ras-related GTP-binding protein | H. sapiens |
| 1754 | 2246-57 | Similar to inositol 1,4,5-triphosphate | C. elegans |
| | | receptor | |
| 1755 | 2246-61 | reverse transcriptase-like protein | Aedes aegypti |
| 1756 | 2247-13 | polyprotein | Drosophila |
| 1757 | 2247-14 | ORF2 for putative reverse transcriptase | Drosophila |
| 1758 | 2247-42 | Asparaginyl tRNA Synthetase | H. sapiens |
| 1759 | 2247-44 | calcium binding protein | Drosophila |
| 1760 | 2247-58 | similar to Fibronectin type III domain | C. elegans |
| 1761 | 2247-62 | reverse transcriptase | Drosophila |
| 1762 | 2247-65 | gag-like protein | Culex pipiens |
| 1763 | 2247-79 | L-3-phosphoserine phosphatase | H. sapiens |
| 1764 | 2247-80 | esterase E4 | Myzus persicae |
| 1765 | 2247-89 | Similar to aldehyde dehydrogenase | C. elegans |
| 1766 | 2248-76 | O-44 protein | Rattus sp. |
| 1767 | 2248-85 | cDNA isolated for this protein using a | H. sapiens |
| | | monoclonal antibody directed against the | |
| | | p27k prosomal protein | |
| 1768 | 2249-3 | Projectin | Drosophila |
| 1769 | 2249-5 | ORF_ID: o312#14 | E. coli |
| 1770 | 2249-9 | Heat shock protein 60 | Culicoides variipennis |
| 1771 | 2249-11 | enigma protein | H. sapiens |
| 1772 | 2249-12 | alpha,alpha-trehalose glucohydrolase | Oryctolagus cuniculus |
| 1773 | 2249-13 | small GTP binding protein | Drosophila |
| 1774 | 2249-14 | Spermidine/putrescine transport system | E. coli |
| | | permease | |
| 1775 | 2249-19 | nueroendocrine-specific protein C | H. sapiens |
| 1776 | 2249-21 | a-agglutinin core subunit | Saccharomyces cerevisiae |
| 1777 | 2249-24 | KIAA0337 | H. sapiens |
| 1778 | 2249-34 | su(wa) protein | Drosophila |
| 1779 | 2249-42 | regulator of kdp operon | E. coli |
| 1780 | 2249-59 | No definition line found | C. elegans |
| 1781 | 2249-60 | proline oxidase | Drosophila |
| 1782 | 2249-62 | Formate acetyltransferase | E. coli |
| 1783 | 2249-70 | similar to HECT-domain | C. elegans |
| 1784 | 2249-75 | PHOSPHORIBOSYLFORMYLGLYCINAMIDINE | E. coli |
| | | CYCLO-LIGASE | |
| 1785 | 2249-77 | Hypothetical 38.5 kd protein in agal-mtr | E. coli |
| | | intergenic region precursor | |
| 1786 | 2249-85 | D4L | Variola virus |
| 1787 | 2249-87 | similar to isocitrate dehydrogenase | C. elegans |
| 1788 | 2250-6 | Fii (head-tail joining; 117) | Bacteriophage Lambda |
| 1789 | 2250-7 | possible NAGC-like transcriptional | E. coli |
| | | regulator | |
| 1790 | 2250-10 | cysteine string protein | Bos taurus |
| 1791 | 2250-13 | Tol B protein | E. coli |
| 1792 | 2250-14 | 6-phosphogluconate dehydratase | E. coli |
| 1793 | 2250-15 | 6-phosphogluconate dehydratase | E. coli |
| 1794 | 2250-22 | PSST subunit of the NADH: ubiquinone | Bos taurus |
| | | oxidoreductase | |
| 1795 | 2250-30 | sol i 3 antigen | Solenopsis invicta |
| 1796 | 2250-36 | predicted using Genefinder; similar to | C. elegans |
| | | tRNA synthetases class I (E and Q | |
| 1797 | 2250-37 | PNP | H. sapiens |
| 1798 | 2250-42 | ORF_ID: o331#2 | E. coli |
| 1799 | 2250-44 | Extensin | E. coli |
| 1800 | 2250-47 | ORF o654 | E. coli |
| 1801 | 2250-48 | Gcap1 gene product | Mus musculus |
| 1802 | 2250-52 | similar to human MLH1 on chromosome | Mus musculus |
| | | 3p21 | |
| 1803 | 2250-53 | Hypothetical 27.6 kd protein in hpt-panD | E. coli |
| | | intergenic region. | |
| 1804 | 2250-58 | UmuC protein | E. coli |
| 1805 | 2250-61 | dJ134E15.1 (Blimp-1 | H. sapiens |
| 1806 | 2250-63 | ribosomal protein L23-related product | Rattus rattus |
| | | homolog | |
| 1807 | 2250-65 | hypothetical protein MJ1143 | E. coli |
| 1808 | 2250-68 | HI0025 homolog | E. coli |
| 1809 | 2250-77 | R34094_1 | H. sapiens |
| 1810 | 2250-78 | erythrocyte binding protein | Plasmodium yoelii |
| 1811 | 2250-79 | fosmidomycin resistance protein | E. coli |
| 1812 | 2250-81 | cyclophilin 1 | Drosophila |
| 1813 | 2250-83 | putative glutamine synthetase | E. coli |
| 1814 | 2251-3 | J (tail:host specificity; 1132) | Bacteriophage Lambda |
| 1815 | 2251-5 | Molybdopterin biosynthesis MoeB protein | E. coli |
| 1816 | 2251-6 | Fo-ATP synthase subunit b | Drosophila |
| 1817 | 2251-9 | citrate lyase alpha chain | E. coli |
| 1818 | 2251-10 | cuticle protein ACP65A | Drosophila |
| 1819 | 2251-13 | H repeat-associated protein in rhsC | E. coli |
| | | 3′region (orf-h3 | |
| 1820 | 2251-20 | glycine-rich protein | Arabadopsis thaliana |
| 1821 | 2251-23 | 2-oxoglutarate dehydrogenase precursor | H. sapiens |
| 1822 | 2251-29 | NFX1 | H. sapiens |
| 1823 | 2251-32 | ebgR product, repressor | E. coli |
| 1824 | 2251-41 | neural protein | Drosophila |
| 1825 | 2251-45 | similar to unidentified ORF | E. coli |
| 1826 | 2251-46 | NADH:ubiquinone oxidoreductase b17.2 | Bos taurus |
| | | subunit | |
| 1827 | 2251-49 | tyrosine kinase | Drosophila |
| 1828 | 2251-50 | coded for by C. elegans cDNA yk89e9.5 | C. elegans |
| 1829 | 2251-57 | H (tail component; 853) | Bacteriophage Lambda |
| 1830 | 2251-60 | Lysyl tRNA Synthetase | Drosophila |
| 1831 | 2251-62 | 7,8-diamino-pelargonic acid | E. coli |
| | | aminotransferase | |
| 1832 | 2251-64 | actin related protein | Drosophila |
| 1833 | 2252-6 | discs-large tumor suppressor | Drosophila |
| 1834 | 2252-16 | S-adenosylmethionine decarboxylase | E. coli |
| 1835 | 2252-17 | F52H3.5 | E. coli |
| 1836 | 2252-21 | translationally controlled tumor protein | Oryctolagus cuniculus |
| 1837 | 2252-31 | GTP binding protein | Rattus rattus |
| 1838 | 2252-34 | mitochondrial porin transcript 1 | Drosophila |
| 1839 | 2252-38 | cuticle protein | Manduca sexta |
| 1840 | 2252-39 | Similarity to Rat CD63 antigen | C. elegans |
| 1841 | 2252-41 | similar to S. cerevisiae Lpg20p | E. coli |
| 1842 | 2252-48 | cut E | E. coli |
| 1843 | 2252-61 | Histone H3 | Spisula solidissima |
| 1844 | 2252-66 | ea10 (ssb; 122) | Bacteriophage Lambda |
| 1845 | 2252-71 | Mao C protein | E. coli |
| 1846 | 2252-72 | miniparomyosin | Drosophila |
| 1847 | 2252-73 | pherophorin-S | Volvox carteri |
| 1848 | 2252-80 | cyclophilin | Mus musculus |
| 1849 | 2252-84 | alternate gene name yhhG | E. coli |
| 1850 | 2222-20 | nucleoporin Nup98 | rat |
| 1851 | 2222-21 | hypothetical protein | Escherichia coli |
| 1852 | 2222-36 | ribosomal protein S11 | human |
| 1853 | 2222-39 | hypothetical protein PFB0315w | Plasmodium falciparans |
| 1854 | 2222-50 | serine/threonine-specific protien k. | Plasmodium falciparans |
| 1855 | 2222-58 | hypothetical protein C25E10.9 | C. elegans |
| 1856 | 2222-64 | transporting ATP synthase | bovine |
| 1857 | 2222-94 | tricarboxylate carrier | rat |
| 1858 | 2218-95 | anoxia upregulated protein | Drosophila melanogaster |

[0066] Table II represents a variety of flea HMT nucleic acid molecules of the present invention. Also cited in Table II are nucleic acid molecules from other organisms which share the closest sequence identity with the cited HMT sequences of the present invention, as determined by a search through the BLAST network as described above.

TABLE II

| SEQ ID NO: | Name | GenBank Homology | Organism |
|---|---|---|---|
| 171 | 2094-23 | mitochondrian ATP synthase, alpha subunit | Drosophila melanogaster |
| 172 | 2104-20 | mitochondrial ATP synthase | Drosophila melanogaster |
| 173 | 2105-14 | ATP synthase gamma-subunit | Homo sapiens |
| 174 | 2167-72 | oligomysin sensitivity conferring protein | Drosophila melanogaster |
| 175 | 2179-20 | ATPase 6 | Drosophila melanogaster |
| 176 | 2193-60 | ATP synthase subunit B | Schizaphis graminum |
| 177 | 2229-41 | ATP synthase alpha subunit | D. melanogaster |
| 178 | 2231-35 | 9 kD basic protein | D. melanogaster |
| 179 | 2231-47 | ATP synthase alpha-subunit | Bos taurus |
| 180 | 2232-95 | mitochondrial ATP synthase subunit 9 | Homo sapiens |
| 181 | 2084-56 | Late embryogenesis abundant protein | Picea glauca |
| 182 | 2084-36 | TGF-beta masking protein/stranded at second | Drosophila melanogaster |
| 183 | 2086-2 | Argonaute protein | Arabidopsis thaliana |
| 184 | 2196-92 | like Drosophila HMPB homeotic | C. elegans |
| | | proboscipedia protein | |
| 185 | 2092-27 | DMDHEM2 | Drosophila melanogaster |
| 186 | 2094-21 | SelD protein | Drosophila melanogaster |
| 187 | 2106-11 | Unr | Rattus norvegicus |
| 188 | 2231-15 | cno (canoe) | D. melanogaster |
| 189 | 2230-79 | ALR homologue | D. melanogaster |
| 190 | 2232-42 | saxophone serine-threonine kinase receptor | D. melanogaster |
| 191 | 2232-68 | selenophosphate synthetase | D. melanogaster |
| 192 | 2088-11 | MMTAX107, TAX responsive element | Mus musculus |
| | | binding protein | |
| 193 | 2089-2 | cs Dna J-1 | Cucumis sativus |
| 194 | 2090-7 | Lethal (2) TID | Drosophila melanogaster |
| 195 | 2102-33 | monocytic leukaemia zinc finger protein | homo sapiens |
| 196 | 2105-26 | orf1 5′ of EpoR | Mus musculus |
| 197 | 2106-6 | contains similarity to EGF-1 | C. elegans |
| 198 | 2106-9 | HSP70 protein | Ceratitis capitata |
| 199 | 2084-60 | 82 kD heat shock protein | Drosophila pseudobscura |
| 200 | 2108-59 | PAR domain protein | Drosophila melanogaster |
| 201 | 2156-34 | yk29g12.3 | C. elegans |
| 202 | 2161-17 | segmentation protein | Drosophila melanogaster |
| 203 | 2162-28 | heat shock protein 70, hsp70A2 | Anopheles albimanus |
| 204 | 2187-18 | Heat shock protein 70 | Anopheles albimanus |
| 205 | 2173-77 | Heat shock protein hsp70 | D. melanogaster |
| 206 | 2165-30 | nucleolar protein | Drosophila melanogaster |
| 207 | 2165-59 | contains similarity to C4-type zinc fingers | C. elegans |
| 208 | 2177-80 | zinc finger protein | Mus musculus |
| 209 | 2181-45 | PAR domain protein 1 | Drosophila melanogster |
| 210 | 2185-9 | Heat shock protein-70 | Anopheles albimanus |
| 211 | 2185-82 | segmentation protein | Drosophila melanogaster |
| 212 | 2188-33 | transcriptional repressor protein | Drosophila melanogaster |
| 213 | 2203-18 | Mastermind | Drosophila virilis |
| 214 | 2205-82 | high mobility group protein 1a | Chironomus tentans |
| 215 | 2230-26 | DNA repair protein | D. melanogaster |
| 216 | 2230-71 | homologue of seven in absentia | Homo sapiens |
| 217 | 2230-89 | nuclear speckle-type protein, SPOP | Homo sapiens |
| 218 | 2230-96 | heat shock protein | D. melanogaster |
| 219 | 2231-7 | hypothetical protein | S. pombe |
| 220 | 2231-38 | Rad51 homolog | Bombyx mori |
| 221 | 2231-81 | DNA repair protein | D. melanogaster |
| 222 | 2232-2 | cellular nucleic acid binding protein | Xenopus laevis |
| 223 | 2234-63 | heat shock protein 70 | Trichoplusia ni |
| 224 | 2232-77 | actin-binding double-zinc-finger protein | Homo sapiens |
| | | (abLIM) | |
| 225 | 2234-78 | DNA-binding protein isoform I | D. melanogaster |
| 226 | 2084-48 | Allantoinase | Rana catesbeiana |
| 227 | 2085-22 | beta-glucuronidase | E. coli |
| 228 | 2094-24 | prolidase = peptidaseD/imidopeptidase | Mus musculus |
| 229 | 2088-43 | branched chain alpha-keto acid | Bos taurus |
| | | dehydrogenase E1-beta subunit | |
| 230 | 2086-29 | 3-hydroxyisobutyrate dehydrogenase | Dictyostelium discoideum |
| 231 | 2088-5 | Rab 5c protein | Canis familiaris |
| 232 | 2095-17 | cytochrome P-450 | Heliothis virescens |
| 233 | 2102-16 | carbamoyl phosphate synthetase II | Plasmodium falciparans |
| 234 | 2102-48 | NADPH cytochrome P450 reductase | Musca domestica |
| 235 | 2104-15 | branched chain alpha-keto acid | Rattus norvegicus |
| | | dehydrogenase | |
| 236 | 2106-5 | Metallothionein | Strongylocentrotus |
| | | | purpuratus |
| 237 | 2106-47 | peroxidoxin-1 | Dirofilaria immitis |
| 238 | 2107-17 | tetracycline transporter-like protein | Mus musculus |
| 239 | 2107-58 | allergen Bla g 5 (glutathione-S-transferase) | Blattella germanica |
| 240 | 2156-58 | HAL-3 homologue | Arabidopsis thaliana |
| 241 | 2195-90 | aminoacyclase-1 | Homo sapiens |
| 242 | 2171-55 | NADPH-ferrihemoprotein reductase | Drosophila melanogaster |
| 243 | 2169-30 | hypothetical protein | Synechocystis sp |
| 244 | 2169-52 | insulin degrading enzyme | Drosophila melanogaster |
| 245 | 2177-64 | 3-hydroxyisobutyrate dehydrogenase | Rattus norvegicus |
| 246 | 2181-69 | Endonexin | Bos taurus |
| 247 | 2138-25 | glutamate dehydrogenase | Drosophila melanogaster |
| 248 | 2230-28 | glutathione-S-transferase | Anopheles gambiae |
| 249 | 2191-8 | lactase-phlorizin hydrolase | Rattus rattus |
| 250 | 2193-52 | cytochrome P450 | Heloithis virescens |
| 251 | 2202-35 | glutathione-S-transferase | Anopheles gambiae |
| 252 | 2229-77 | glutathione-S-transferase | Anopheles gambiae |
| 253 | 2229-81 | urate oxidase | D. melanogaster |
| 254 | 2231-42 | superoxide dismutase | Cervus elaphus |
| 255 | 2232-74 | allergen Bla g 5 | Blattella germanica |
| 256 | 2234-42 | glutathione reductase family | Musca domestica |
| 257 | 2087-8 | cystic fibrosis transmembrane | Homo sapiens |
| | | conductance regulator | |
| 258 | 2087-23 | Nervous system antigen 2 | Drosophila melanogaster |
| 259 | 2091-56 | adenosine triphosphatase | Homo sapiens |
| 260 | 2094-20 | sodium pump, alpha suhbunit | Ctenocephalides felis |
| 261 | 2095-51 | similar to Hrs | C. elegans |
| 262 | 2103-24 | N-methyl-D-aspartate receptor-associated | Drosophila melanogaster |
| | | protein | |
| 263 | 2105-55 | inward rectifying K channel | Sus scrofa |
| 264 | 2105-63 | EF-hand Ca2+ binding protein p22 | Rattus norvegicua |
| 265 | 2106-62 | Dents disease candidate gene product | Homo sapiens |
| 266 | 2167-50 | PKD1 (polycystic kidney disease 1) | Fugu rubripes |
| 267 | 2185-37 | copper-transporting ATPase | Archaeoglobus fulgidus |
| 268 | 2193-29 | TrkG Potassium transport protein | E. coli |
| 269 | 2195-33 | silicon transporter | Cylindrotheca fusiformis |
| 270 | 2202-16 | similarity to human sulfate anion transporter | C. elegans |
| 271 | 2230-2 | sulfate transporter | Arabidopsis thaliana |
| 272 | 2230-69 | mitochondrial porin | D. melanogaster |
| 273 | 2231-22 | muscarinic acetylcholine receptor | D. melanogaster |
| 274 | 2231-24 | p97 subunit of 15S Mg(2+)-ATPase | Xenopus laevis |
| 275 | 2231-32 | anion transporting ATPase | Aquifex aeolicus |
| 276 | 2231-70 | sulfate permease | Schizosaccharomyces |
| | | | pombe |
| 277 | 2231-94 | putative Na/H exchanger | S. pombe |
| 278 | 2233-6 | plasma membrane Ca2+-ATPase 2 | Mus musculus |
| 279 | 2233-24 | chloride channel gene, CLIC2 | Homo sapiens |
| 280 | 2085-61 | beta-type protein kinase C | Bos taurus |
| 281 | 2089-20 | cGMP-dependent protein kinase | Drosophila melanogaster |
| 282 | 2092-12 | Btk | Homo sapiens |
| 283 | 2093-64 | Receptor-like protein tyrosine phosphatase | Drosophila melanogaster |
| 284 | 2095-31 | frt (fms-related tyrosine kinase gene) | Homo sapiens |
| 285 | 2094-58 | casein kinase II beta | Oryctolagus cuniculus |
| 286 | 2103-54 | ORF YGL084c | Saccharomyces cerevisiae |
| 287 | 2106-42 | protein phosphatase epsilon subunit | Homo sapiens |
| 288 | 2156-5 | serine/threonine kinase | Rattus norvegicus |
| 289 | 2157-95 | cGMP-dependent protein kinase | Drosophila melanogaster |
| 290 | 2165-80 | ABL gene product | Gallus gallus |
| 291 | 2165-63 | diadenosine tetraphosphatase | Homo sapiens |
| 292 | 2167-17 | adenylate cyclase | S. cereviciae |
| 293 | 2177-44 | serine/threonine kinase | C. elegans |
| 294 | 2188-16 | weakly similar to serine/threonine kinase | C. elegans |
| 295 | 2191-60 | carbohydrate kinase, pfkB family | Archaeoglobus fulgidus |
| 296 | 2195-22 | protein kinase | Drosophila melanogaster |
| 297 | 2196-30 | calcium-dependent protein kinase | A. thaliana |
| 298 | 2205-83 | protein kinase/endoribonulcease (IRE1) | Homo sapiens |
| 299 | 2205-87 | receptor tyrosine phosphatase | Hirudo medicinalis |
| 300 | 2229-11 | magnesium-dependent calcium | Bos taurus |
| | | inhibitable phosphatase | |
| 301 | 2229-29 | phosphoglycerate kinase | Schistosoma mansoni |
| 302 | 2229-74 | pyruvate kinase | D. melanogaster |
| 303 | 2230-55 | serine/threonine specific protein phosphatase 4 | D. melanogaster |
| 304 | 2230-57 | stress activated MAP kinase kinase 3 | D. melanogaster |
| 305 | 2231-64 | alkaline phosphatase | D. melanogaster |
| 306 | 2231-91 | olynucleotide phosphorylase | Yersinia enterocolitica |
| 307 | 2232-43 | protein kinase PkwA | Thermomonospora curvata |
| 308 | 2234-94 | serine/threonine kinase ULK1 | Homo sapiens |
| 309 | 2085-18 | Pyridoxamine phosphate oxidase | C. elegans |
| 310 | 2094-13 | sphingomyelin phosphodiesterase | Mus musculus |
| 311 | 2105-47 | apolipoprotein E receptor 2 | Homo sapiens |
| 312 | 2092-38 | squalene synthetase | Homo sapiens |
| 313 | 2094-25 | fatty acid synthetase | Rattus norvegicus |
| 314 | 2089-32 | coproporphyrinogen oxidase | Homo sapiens |
| 315 | 2085-46 | HADHB mitochondrial trifunctional protein | Homo sapiens |
| | | beta subunit | |
| 316 | 2104-56 | pyridoxal kinase | Homo sapiens |
| 317 | 2107-30 | Phosphomevalonate kinase | Homo sapiens |
| 318 | 2154-70 | very-long chain acyl-CoA dehydrogenase | Mus musculus |
| 319 | 2191-85 | stearyl-CoA desaturase | Cyprinus carpio |
| 320 | 2192-44 | very-long-chain Acyl-CoA dehydrogenase | Rattus norvegicus |
| 321 | 2195-55 | Similar to LDL receptor-related protein | C. elegans |
| 322 | 2229-82 | lipase-3 | D. melanogaster |
| 323 | 2231-59 | Phosphatidylethanolamine-binding protein | Macaca fascicularis |
| 324 | 2233-25 | similarity to | C. elegans |
| | | yeast ethanolaminephosphotransferase | |
| 325 | 2233-41 | cellular retinoic acid binding protein | Manduca sexta |
| | | (mCRABP) | |
| 326 | 2087-61 | I allergen | Lepidoglyphus destructor |
| 327 | 2087-41 | chloroquine resistance candidate protein | Plasmodium falciparum |
| 328 | 2089-51 | Xenopus Bf B | Xenopus laevis |
| 329 | 2086-58 | repeat organellar protein | Plasmodium falciparum |
| 330 | 2090-45 | heat shock cognate protein | Drosophila melanogaster |
| 331 | 2104-23 | 40 kDa heat shock chaperone protein | Deinococcus |
| 332 | 2107-26 | Luciferase | Photuris pennsylvanica |
| 333 | 2162-46 | F20D1.9 | C. elegans |
| 334 | 2162-49 | PKR inhibitor P58 | Bos taurus |
| 335 | 2162-93 | GroES homologue | Ricketsia |
| 336 | 2171-46 | NH2 terminus uncertain | Leishmania tarentolae |
| 337 | 2089-10 | beta adaptin | Drosophila melanogaster |
| 338 | 2229-24 | non-functional folate binding protein | Homo sapiens |
| 339 | 2229-25 | calmodulin B | Halocynthia roretzi |
| 340 | 2229-31 | putative T1/ST2receptor binding protein | C. elegans |
| 341 | 2229-36 | alpha-crystallin cognate protein 25 | Plodia interpunctella |
| 342 | 2229-40 | Defensin | Apis mellifera |
| 343 | 2229-86 | glutamate - ammonia ligase | D. melanogaster |
| 344 | 2231-49 | melanoma-associated antigen ME491 | Homo sapiens |
| 345 | 2231-76 | histone C | Drosophila virilis |
| 346 | 2232-65 | translationally controlled tumor protein | Oryctolagus cuniculus |
| 347 | 2232-84 | Apyrase | Aedes aegypti |
| 348 | 2232-85 | KIAA0124 | Homo sapiens |
| 349 | 2233-59 | Glutamine-dependent | C. elegans |
| | | carbamoyl-phosphate synthase | |
| 350 | 2233-86 | ANG12 precursor | Anopheles gambiae |
| 351 | 2234-11 | tissue specific secretory protein | Pan troglodytes |
| 352 | 2234-76 | methionine adenosyltransferase | D. melanogaster |
| 353 | 2089-13 | Synaptic vessicle protein 2 form B | Rattus norvegicus |
| 354 | 2159-52 | glycoprotein 56 | Rattus norvegicus |
| 355 | 2084-6 | CLN3; homologue of the gene underlying | Mus musculus |
| | | Batten disease | |
| 356 | 2085-10 | Amphiphysin | Gallus gallus |
| 357 | 2156-39 | glycoprotein 55 | Rattus norvegicus |
| 358 | 2104-59 | Transmembrane transporter | Discopyge ommata |
| 359 | 2105-9 | insect intestinal mucin II | Trichoplusia ni |
| 360 | 2106-14 | kinesin-like protein | D. melanogaster |
| 361 | 2107-45 | Lazarillo precursor | Schistocerca americana |
| 362 | 2156-3 | clathrin-associated protein | Mus musculus |
| 363 | 2161-46 | neural variant mena+ protein | Mus musculus |
| 364 | 2171-92 | Malvolio | Drosophila melanogaster |
| 365 | 2175-18 | homolog of SYT - synaptotagmin | Mus musculus |
| 366 | 2177-10 | GABA receptor subunit (Rdl) | Aedes aegypti |
| 367 | 2181-10 | neurexin IV | Drosophila melanogaster |
| 368 | 2191-92 | synaptic vessicle protein 2B | Rattus norvegicus |
| 369 | 2229-18 | Synaptic vessicle protein 2A | Rattus norvegicus |
| 370 | 2194-38 | gamma-subunit of mouse nerve growth factor | Mus musculus |
| 371 | 2230-60 | lin-7-C | Rattus norvegicus |
| 372 | 2230-81 | PDZ domain protein | Homo sapiens |
| 373 | 2234-5 | Gcap1 gene product | Mus musculus |
| 374 | 2234-55 | Gcap1 gene product | Mus musculus |
| 375 | 2234-71 | Gcap1 gene product | Mus musculus |
| 376 | 2085-34 | Liver-specific transport protein | Rattus norvegicus |
| 377 | 2087-15 | polyspecific organic cation transporter | Homo sapiens |
| 378 | 2204-80 | transmembrane transporter | Discopyge ommatta |
| 379 | 2093-39 | liver-specific transport protein | Rattus norvegicus |
| 380 | 2093-46 | similar to monocarboxylate transporter family | C. elegans |
| 381 | 2092-22 | similar to matrin F/G | C. elegans |
| 382 | 2103-50 | Unknown | Drosophila melanogaster |
| 383 | 2103-51 | organic cation transporter | Rattus norvegicus |
| 384 | 2197-35 | renal organic cation transporter | Oryctolagus cuniculus |
| 385 | 2156-17 | sulfate anion transporter | Manduca sexta |
| 386 | 2166-84 | LX1 | Mus musculus |
| 387 | 2167-94 | MCT (monocarboxylate transporter) | Homo sapiens |
| 388 | 2196-83 | renal organic cation transporter | Oryctolagus cuniculus |
| 389 | 2229-83 | similarity to monocarboxylate transporter 1 | C. elegans |
| 390 | 2231-89 | Golgi 4-transmembrane spanning transporter | Mus musculus |
| | | MTP | |
| 391 | 2158-8 | phosphate carrier protein | C. elegans |
| 392 | 2085-14 | ADP/ATP translocase | Drosophila melanogaster |
| 393 | 2085-17 | Na+-dependent inorganic | Drosophila melanogaster |
| | | phosphatase cotransporter | |
| 394 | 2088-38 | ADP/ATP translocase | Bos taurus |
| 395 | 2092-50 | ADP/ATP translocase | Drosophila melanogaster |
| 396 | 2104-21 | Na(+)-dependent inorganic | Drosophila melanogaster |
| | | phosphate cotransporter | |
| 397 | 2121-55 | phosphate carrier protein | C. elegans |
| 398 | 2105-64 | phosphate carrier protein | Homo sapiens |
| 399 | 2102-6 | ZK512.6 | C. elegans |
| 400 | 2108-27 | mitochondrial phosphate carrier protein | Homo sapiens |
| 401 | 2194-63 | mitochondrial phosphate transporter | Rattus norvegicus |
| 402 | 2196-14 | phosphate/triose-phosphate | C. elegans |
| | | translocator precursor | |
| 403 | 2204-11 | EST clone | D. melanogaster |
| 404 | 2085-16 | Chymotrypsin I | Anopheles gambiae |
| 405 | 2085-54 | Chymotrypsin II | Anopheles gambiae |
| 406 | 2086-12 | Plasminogen | Homo sapiens |
| 407 | 2086-18 | Trypsin eta | Drosophila melanogaster |
| 408 | 2090-21 | Trypsin | Manduca sexta |
| 409 | 2092-15 | Alp1 | Cochliobolus carbonum |
| 410 | 2102-11 | vitellin-degrading protease | Bombyx mori |
| 411 | 2102-17 | Chymotrypsin II | Anopheles gambiae |
| 412 | 2102-51 | chymotrypsin-like protease | Anopheles gambiae |
| 413 | 2103-31 | Beta trypsin | Drosophila erecta |
| 414 | 2107-22 | Factor IX | Rattus norvegicus |
| 415 | 2108-29 | Trypsin | Anopheles stephensi |
| 416 | 2157-15 | Trypsin | Choristoneura fumiferana |
| 417 | 2160-34 | Aminopeptidase | Synechocystis |
| 418 | 2160-36 | E01G6.1 | C. elegans |
| 419 | 2103-62 | plasminogen activator inhibitor 2 | Mus musculus |
| 420 | 2167-36 | factor IX | Oryctolagus cuniculus |
| 421 | 2167-67 | Alp1 | Cochliobolus carbonum |
| 422 | 2169-51 | Trypsin | Aedes aegypti |
| 423 | 2181-27 | Chymotrypsin BII | Penaeus vannamei |
| 424 | 2185-69 | plasma prekallikrein | Homo sapeins |
| 425 | 2187-20 | pre-procathepsin L | Paragonimus westermani |
| 426 | 2188-45 | vitellin-degrading protease | Bombyx mori |
| 427 | 2192-91 | late trypsin precourser | Culex pipiens |
| | | | quinquefasciatus |
| 428 | 2196-10 | SPC2 | Branchiostoma |
| | | | californiensis |
| 429 | 2196-88 | Trypsin | Anopheles stephensi |
| 430 | 2204-9 | carnitine/choline acetyltransferase | C. elegans |
| 431 | 2229-7 | iota trypsin | D. melanogaster |
| 432 | 2229-22 | Trypsin | Anopheles gambiae |
| 433 | 2229-89 | Trypsin | Anopheles gambiae |
| 434 | 2229-94 | late trypsin precourser | Culex pipiens |
| | | | quinquefasciatus |
| 435 | 2230-59 | Chymotrypsin 1 | Anopheles gambiae |
| 436 | 2230-67 | carboxypeptidase A | Drosophila heteroneura |
| 437 | 2231-62 | aminopeptidase N | Sus scxrofa |
| 438 | 2231-74 | limulus factor C serine protease | Tachypleus tridentatus |
| 439 | 2232-15 | cysteine proteinase | Sitophilus zeamais |
| 440 | 2232-25 | Carboxypeptidase | Simulium vitatum |
| 441 | 2232-33 | putative aspartic protease | Brassica oleracea |
| 442 | 2233-46 | aminopeptidase N | Pleuronectes americanus |
| 443 | 2233-85 | chymotrypsin 1 | Anopheles gambiae |
| 444 | 2233-90 | Trypsin | Anopheles stephensi |
| 445 | 2233-94 | preprechymotrypsin 1 | Penaeus vannamei |
| 446 | 2234-29 | chymotrypsin-like protease precursor | Aedes aegypti |
| 447 | 2234-58 | Putative | C. elegans |
| 448 | 2234-61 | carboxylesterase precursor | Aphis gossypii |
| 449 | 2234-68 | serine protease inhibitor I | Schistocerca gregaria |
| 450 | 2084-35 | Integral membrane protein | Mus musculus |
| 451 | 2086-45 | similar to beta-ureidopropionase of Rat | C. elegans |
| 452 | 2087-54 | Cyclin | Mus musculus |
| 453 | 2088-22 | Esp 8 | Mus musculus |
| 454 | 2091-16 | contains similarity to EGF-like domains | C. elegans |
| 455 | 2091-29 | multiple exostosis-like protein | Homo sapiens |
| 456 | 2091-30 | apoptosis 1 inhibitor | Drosophila melanogaster |
| 457 | 2092-33 | KIAA0023 (putitive oncogene) | Homo sapiens |
| 458 | 2095-35 | G coupled receptor | C. elegans |
| 459 | 2095-3 | Go (heterotrimeric guanyl nucleotide | Manduca sexta |
| | | binding protein alpha subunit) | |
| 460 | 2085-4 | gp 150 protein | Drosophila melanogaster |
| 461 | 2103-28 | leukotriene A4 hydrolase | Rattus sp. |
| 462 | 2105-62 | putitive orf | Homo sapiens |
| 463 | 2107-6 | activator protein | Drosophila melanogaster |
| 464 | 2107-28 | platelet-endothelial tetraspan antigen 3 | Homo sapiens |
| 465 | 2189-3 | oligopeptidase A (prlC) | Haemopholis influenzea |
| 466 | 2156-54 | fibroblast growth factor receptor | Xenopus laevis |
| 467 | 2160-92 | contains similarity to EGF-like domains | C. elegans |
| 468 | 2160-65 | weak similarity to the drosophila hyperplastic | C. elegans |
| | | disc protein | |
| 469 | 2165-53 | inositol triphosphate receptor | Rattus norvegicus |
| 470 | 2166-22 | placental protein 11 | Homo sapiens |
| 471 | 2166-92 | elongation factor 1 alpha-like | Drosophila melanogaster |
| 472 | 2181-34 | DSch | Drosophila melanogaster |
| 473 | 2192-65 | STAM, signal transducing adaptor molecule | Homo sapiens |
| 474 | 2194-24 | ATPases associated with various cellular | Arabidopsis thaliana |
| | | activities (AAA family) | |
| 475 | 2196-75 | similar to cell division control protein | C. elegans |
| 476 | 2230-38 | EST clone | S. cereviciae |
| 477 | 2230-39 | NTPase | D. melanogaster |
| 478 | 2230-66 | adenylyl cyclase aggregation protein | Dictyostelium discoideum |
| 479 | 2230-80 | sphingomyelin phosphodiesterase | C. elegans |
| 480 | 2231-29 | nuclear antigen H731 | Homo sapiens |
| 481 | 2231-40 | suppressor of actin mutation 2 | Homo sapiens |
| 482 | 2231-66 | DET1 | Arabidopsis thaliana |
| 483 | 2232-7 | Calreticulin | D. melanogaster |
| 484 | 2232-38 | activator protein | D. melanogaster |
| 485 | 2232-69 | ornithine decarboxylase | Gallus gallus |
| 486 | 2233-32 | similar bHLH-PAS | D. melanogaster |
| 487 | 2233-45 | rab1 | D. melanogaster |
| 488 | 2234-2 | C10A gene product | Mus musculus |
| 489 | 2234-72 | QM homolog | D. melanogaster |
| 490 | 2084-17 | Integral membrane protein | Herpesvirus-2 |
| 491 | 2091-4 | endomembrane protien EMP70 precourser | Arabidopsis thaliana |
| | | isolog | |
| 492 | 2102-45 | Ylr251wp | Saccharomyces cerevisiae |
| 493 | 2162-68 | 220 kDa silk protein | Chironomus thummi |
| 494 | 2160-47 | precursor HT7 protein | Gallus gallus |
| 495 | 2161-12 | peritrophin 95 precourser | Lucilia cuprina |
| 496 | 2161-15 | yk86g11.5 | C. elegans |
| 497 | 2171-12 | 51A surface protein | Paramecium tetraurelia |
| 498 | 2173-18 | hypothetical - mitochondrial membrane | Schizosaccharomyces |
| | | transport protein | pombe |
| 499 | 2087-32 | est sequence | C. elegans |
| 500 | 2091-19 | Similar to P. aeruginosa hypothetical protein | C. elegans |
| 501 | 2192-86 | tyrosine kinase | Drosophila melangaster |
| 502 | 2086-42 | M04B2.4 | C. elegans |
| 503 | 2088-16 | glycoprotein 330 | C. elegans/Human |
| 504 | 2088-39 | EST sequence | Arabidopsis thaliana |
| 505 | 2088-57 | Yer 126 cp | Saccharomyces cereviciae |
| 506 | 2089-25 | similar to S. cereviciae hypothetical | C. elegans |
| | | protein YKL166 | |
| 507 | 2090-3 | EST sequence | Saccharomyces cereviciae |
| 508 | 2090-53 | EST sequence | C. elegans |
| 509 | 2095-20 | Chloroplast ORF | Marchantia polymorpha |
| 510 | 2102-28 | similar to S. cerevisiae hypothetical | C. elegans |
| | | protein YKL166 | |
| 511 | 2102-55 | D1054.3 | C. elegans |
| 512 | 2102-58 | ZC513.5 gene product | C. elegans |
| 513 | 2105-44 | E 1087 protein | Saccharomyces cerevisiae |
| 514 | 2109-24 | F11C1.5 | C. elegans |
| 515 | 2154-21 | disulfide-like protein | Acanthamoeba castellanii |
| 516 | 2156-6 | ZK470.1 | C. elegans |
| 517 | 2156-18 | BIIIA3 | Ovis aries |
| 518 | 2156-27 | AFR1 | S. cereviciae |
| 519 | 2165-94 | COS41.8 | Ciona intestinalis |
| 520 | 2167-65 | EST sequence, function unknown | C. elegans |
| 521 | 2171-93 | KIAA0160 | Homo sapiens |
| 522 | 2175-45 | ORF YJR83.18 | S. cereviciae |
| 523 | 2185-66 | rps4 | Plasmodium falciparum |
| 524 | 2195-40 | C27C12.4 | C. elegans |
| 525 | 2196-20 | glycoprotein A | Pneumocystis carinii |
| 526 | 2205-89 | BKRF1 encodes EBNA-1 protein | Epstein Barr virus |
| 527 | 2229-19 | D4L | Variola virus |
| 528 | 2230-35 | KIAA0747 | Homo sapiens |
| 529 | 2231-8 | l3 | Mus musculus |
| 530 | 2231-78 | unknown protein | Arabidopsis thaliana |
| 531 | 2232-49 | Similarity to Yeast hypothetical 52.9 KD | C. elegans |
| | | protein | |
| 532 | 2232-52 | tetratricopeptide repeat protein (tpr2) | Homo sapiens |
| 533 | 2233-5 | similar to Saccharomyces cerevisiae | C. elegans |
| | | SCD6 protein | |
| 534 | 2233-22 | cDNA EST yk486b9.3 | C. elegans |
| 535 | 2233-93 | CDC27Dm | D. melanogaster |
| 536 | 2084-34 | Immune suppressor/V-ATPase 115 kDa | Mus musculus |
| | | subunit | |
| 537 | 2086-30 | V-ATPase A-subunit | Aedes aegypti |
| 538 | 2087-45 | H+ ATPase | Drosophila melanogaster |
| 539 | 2088-55 | 40-kDa-V-ATPase subunit | Manduca sexta |
| 540 | 2088-62 | vacuolar ATPase subunit A | Drosophila melanogaster |
| 541 | 2091-26 | proton-ATPase-like protein | Homo sapiens |
| 542 | 2091-31 | vacuolar ATPase subunit A | Drosophila melanogaster |
| 543 | 2092-20 | vacuolar ATPase 115 kDa subunit | Homo sapiens |
| 544 | 2095-18 | similar to S. cereviciae vacuolar H(+)-ATPase | C. elegans |
| | | 54 kD subunit | |
| 545 | 2095-54 | H (+)-transporting ATPase subunit B | Manduca sexta |
| 546 | 2108-8 | similar to S. cereviciae 54 kDa V-ATPase | C. elegans |
| | | subunit | |
| 547 | 2154-36 | V-ATPase subunit E | Drosophila melanogaster |
| 548 | 2154-76 | V-ATPase subunit A (new fragment) | Aedes aegypti |
| 549 | 2166-32 | V-ATPase C subunit | Drosophila melanogaster |
| 550 | 2166-33 | vacuolar (V-type) H(+)-ATPase B subunit | Helicoverpa virescens |
| 551 | 2166-90 | beta subunit of ATPase | Schizaphis graminum |
| 552 | 2161-5 | ATPase I | Plasmodium falciparum |
| 553 | 2171-24 | similar to V-ATPase 116 kd subunit | C. elegans |
| 554 | 2169-82 | V-ATPase subunit E | Drosophila melanogaster |
| 555 | 2187-36 | V-ATPase membrane sector associated | Homo sapiens |
| | | protein M8-9 | |
| 556 | 2188-91 | V-ATPase subunit A | Candida tropicalis |
| 557 | 2230-88 | vacuolar ATPase G subunit | Manduca sexta |
| 558 | 2232-61 | V-ATPase subunit C | D. melanogaster |
| 559 | 2086-52 | Penelope transposable element ORF | Drosophila virilis |
| 560 | 2103-2 | genome polyprotein gene product | Plum pox virus |
| 561 | 2106-8 | pol protein | Human T-cell lymphotropic |
| | | | virus type 2 |
| 562 | 2108-41 | reverse transcriptase, Doc retroposon | Drosophila melanogaster |
| 563 | 2202-28 | Polyprotein | Hepatitis virus C |
| 564 | 2165-95 | DNA polymerase | Choristoneura biennis |
| | | | entomopoxvirus |
| 565 | 2169-81 | reverse transcriptase | Drosophila melanogaster |
| 566 | 2181-36 | reverse transcriptase | Anopheles gambiae |
| 1416 | 2240-4 | alpha-L-fucosidase precursor | Homo sapiens |
| 1417 | 2240-11 | estrogen related receptor alpha | Mus musculus |
| 1418 | 2240-14 | NADH:ubiquinone oxidoreductase 51-kD | Homo sapiens |
| | | subunit | |
| 1419 | 2240-17 | peritrophin 1 | Anopheles gambiae |
| 1420 | 2240-19 | small GTPase rac1b | Homo sapiens |
| 1421 | 2240-23 | Symplekin | Homo sapiens |
| 1422 | 2240-26 | ribosomal protein L30 | Bos taurus |
| 1423 | 2240-28 | 60S Ribosomal Protein RPL10A | Homo sapiens |
| 1424 | 2240-29 | KIN17 protein | D. melanogaster |
| 1425 | 2240-31 | eukaryotic initiation factor 4 gamma | Homo sapiens |
| 1426 | 2240-38 | ornithine decarboxylase antizyme | D. melanogaster |
| 1427 | 2240-44 | electron transfer flavoprotein | Rattus norvegicus |
| 1428 | 2240-53 | EST clone | C. elegans |
| 1429 | 2240-55 | glutathione reductase family | Musca domestica |
| 1430 | 2240-58 | chymotrypsin-like serine protease | C. felis |
| 1431 | 2240-63 | ferritin subunit 1 | D. melanogaster |
| 1432 | 2240-64 | vacuolar ATPase subunit B | D. melanogaster |
| 1433 | 2240-66 | chaperonin containing TCP-1 delta | Fugu rubripes |
| 1434 | 2240-70 | 1-acyl-glycerol-3-phosphate acyltransferase | Zea mays |
| 1435 | 2240-71 | EST clone AL021106 | D. melanogaster |
| 1436 | 2240-72 | 376aa long hypothetical dehydrogenase | Pyrococcus horikoshii |
| 1437 | 2240-77 | chymotrypsin-like serine protease | C. felis |
| 1438 | 2240-80 | EST clone | C. elegans |
| 1439 | 2240-83 | chymotrypsin-like serine protease | C. felis |
| 1440 | 2240-90 | cytochrome P450 | D. melanogaster |
| 1441 | 2240-93 | enhancer-trap-locus-1 | Mus musculus |
| 1442 | 2240-94 | glycerol-3-phosphate dehydrogenase | Ceratitis capitata |
| 1443 | 2241-3 | FS-H precourser | Ctenocephalides felis |
| 1444 | 2241-5 | trypsin-like serine protease | Ctenocephalides felis |
| 1445 | 2241-7 | myospheroid protein | D. melanogaster |
| 1446 | 2241-10 | Sam50 | D. melanogaster |
| 1447 | 2241-12 | NADH dehydrogenase subunit 2 | Chorthippus parallelus |
| 1448 | 2241-15 | putative protein | Arabidopsis thaliana |
| 1449 | 2241-16 | contains EGF-like repeats | C. elegans |
| 1450 | 2241-20 | Gcap1 gene product | Mus musculus |
| 1451 | 2241-25 | Na(+)-dependent inorganic phosphate | D. melanogaster |
| | | cotransporter | |
| 1452 | 2241-31 | D4L | Variola virus |
| 1453 | 2241-36 | plenty-of-prolines-101; POP101; | Mus musculus |
| | | SH3-philo-protein | |
| 1454 | 2241-40 | EF-1-alpha | D. melanogaster |
| 1455 | 2241-44 | F1-ATP synthase epsilon-subunit | lpomoea batatas |
| 1456 | 2241-54 | ribosomal protein S28 | Homo sapiens |
| 1457 | 2241-55 | Y-box protein | D. melanogaster |
| 1458 | 2241-56 | short-chain alcohol dehydrogenase | Homo sapiens |
| 1459 | 2241-59 | contains 3 cysteine rich repeats | C. elegans |
| 1460 | 2241-60 | muscle type phosphofructokinase | Canis familiaris |
| 1461 | 2241-61 | Heat shock protein 82 | Mus musculus |
| 1462 | 2241-65 | chymotrypsin-like protease | C. felis |
| 1463 | 2241-66 | Oligosaccharyltransferase subunit | D. melanogaster |
| 1464 | 2241-70 | EST clone | D. melanogaster |
| 1465 | 2241-72 | failed axon connections protein | D. melanogaster |
| 1466 | 2241-74 | Enolase | Hymenolepis diminuta |
| 1467 | 2241-78 | multiple exostosis 2 protein | Mus musculus |
| 1468 | 2241-80 | Protein on Ecdysone Puffs | D. melanogaster |
| 1469 | 2241-82 | paramyosin | D. melanogaster |
| 1470 | 2241-83 | beta-tubulin | Bombyx mori |
| 1471 | 2241-84 | natural killer cell enhancing factor | Cyprinus carpio |
| 1472 | 2241-86 | similar to MYOTUBULARIN-RELATED | Homo sapiens |
| | | PROTEIN | |
| 1473 | 2241-87 | Renin | Rattus norvegicus |
| 1474 | 2241-90 | Myophilin | Echinococcus |
| | | | multilocularis |
| 1475 | 2243-10 | alpha-actinin | D. melanogater |
| 1476 | 2243-11 | monocarboxylate transporter | Homo sapiens |
| 1477 | 2243-13 | yk278a10.3 | C. elegans |
| 1478 | 2243-15 | selenium donor protein | Homo sapiens |
| 1479 | 2243-18 | acetyl-CoA synthetase | D. melanogater |
| 1480 | 2243-20 | cytochrome P450 CYP12A3 | Musca domestica |
| 1481 | 2243-22 | NADH dehydrogenase subunit 4 | Anopheles arabiensis |
| 1482 | 2243-27 | Polyubiquitin | Cricetulus griseus |
| 1483 | 2243-28 | Moesin | D. melanogater |
| 1484 | 2243-31 | QM protein | Bombyx mandarina |
| 1485 | 2243-32 | Sec23 protein | Homo sapiens |
| 1486 | 2243-37 | truncated protein | S. cereviciae |
| 1487 | 2243-38 | Projectin | D. melanogater |
| 1488 | 2243-39 | Unknown | Homo sapiens |
| 1489 | 2243-41 | similar to enoyl-CoA hydratase | C. elegans |
| 1490 | 2243-45 | similar to dehydrogenase | C. elegans |
| 1491 | 2243-46 | trypsin-like serine protease | C. felis |
| 1492 | 2243-48 | Merlin | Rattus norvegicus |
| 1493 | 2243-52 | GTP-specific succinyl-CoA synthetase beta | Homo sapiens |
| | | subunit | |
| 1494 | 2243-53 | sod protein (superoxide dismutase) | Drosophila virilis |
| 1495 | 2243-54 | trypsin-like serine protease | C. felis |
| 1496 | 2243-61 | chymotrypsin-like serine protease | C. felis |
| 1497 | 2243-66 | Tag B | Dictyostelium discoideum |
| 1498 | 2243-67 | hypothetical protien | Arabidopsis thaliana |
| 1499 | 2243-68 | heat shock cognate protein 70 | Trichoplusia ni |
| 1500 | 2243-72 | TRIP-1 homologue | D. melanogater |
| 1501 | 2243-73 | cytosolic NADP-dependent isocitrate | Microtis mexicanis |
| | | dehydroganase | |
| 1502 | 2243-86 | progesterone-induced protein | Oryctolagus cuniculus |
| 1503 | 2243-87 | Bmsqd-2 | Bombyx mori |
| 1504 | 2243-91 | sodium/iodide symporter | Homo sapiens |
| 1505 | 2243-92 | ORF2 | Acidianus ambivalens |
| 1506 | 2243-94 | lysosomal beta-galactosidase | Felis cattus |
| 1507 | 2244-12 | tropomyosin isoform 127 | D. melanogaster |
| 1508 | 2244-19 | KIAA0181 | Homo sapiens |
| 1509 | 2244-23 | plasma membrane calcium ATPase isoform 1 | Homo sapiens |
| 1510 | 2244-29 | NADH dehydrogenase | Bos taurus |
| 1511 | 2244-44 | glutamate dehydrogenase | D. melanogaster |
| 1512 | 2244-54 | spliceosomal protein | D. melanogaster |
| 1513 | 2244-59 | ciliary body glutathione peroxidase | Bos taurus |
| 1514 | 2244-61 | pyridoxal-phoshate-dependent | C. elegans |
| | | aminotransferases | |
| 1515 | 2244-64 | Unknown | Rattus norvegicus |
| 1516 | 2244-69 | trypsin-like serine protease | C. felis |
| 1517 | 2244-71 | peritrophin 1 | Anopheles gambiae |
| 1518 | 2244-75 | NADH dehydrogenase subunit 5 | Anopheles gambiae |
| 1519 | 2244-84 | microsomal epoxide hydrolase | Rattus norvegicus |
| 1520 | 2244-86 | C54G7.2 gene product | C. elegans |
| 1521 | 2244-91 | Aminopeptidase N | Plutella xylostella |
| 1522 | 2253-2 | cytochrome C oxidase | H. sapiens |
| 1523 | 2253-13 | Initiation factor 5A | Gallus gallus |
| 1524 | 2253-14 | protein phosphatase type 2A catalytic subunit | Bos taurus |
| 1525 | 2253-16 | myosin light chain 2 | D. melanogaster |
| 1526 | 2253-18 | cDNA EST yk462d1.5 | C. elegans |
| 1527 | 2253-19 | ribosomal protein S10 | H. sapiens |
| 1528 | 2253-24 | aspartyl(asparaginyl)beta-hydroxylase, HAAH | H. sapiens |
| 1529 | 2253-27 | larval and adult myosin heavy chain | D. melanogaster |
| 1530 | 2253-33 | nervous system antigen 2 | D. melanogaster |
| 1531 | 2253-36 | dJ366N23.2 | H. sapiens |
| 1532 | 2253-40 | hrp48.1 | D. melanogaster |
| 1533 | 2253-42 | ZnT-1 | Mus musculus |
| 1534 | 2253-43 | aminopeptidase N | Manduca sexta |
| 1535 | 2253-56 | Profilin | D. melanogaster |
| 1536 | 2253-59 | T26A5. | H. sapiens |
| 1537 | 2253-68 | NADH-ubiquinone oxidoreductase 42 kDa | D. melanogaster |
| | | subunit | |
| 1538 | 2253-78 | gycine-rich protein | |
| 1539 | 2253-81 | 5′-nucleotidase | H. sapiens |
| 1540 | 2253-86 | glutathione S-transferase | Anopheles gambiae |
| 1541 | 2253-87 | ferritin subunit 1 | D. melanogaster |
| 1542 | 2253-92 | myosin light chain 2 | D. melanogaster |
| 1543 | 2253-94 | xylose-proton symport | E. coli |
| 1544 | 2254-4 | mature-parasite-infected erythrocyte surface | P. falciparum |
| | | antigen | |
| 1545 | 2254-6 | Fo-ATP synthase subunit b | D. melanogaster |
| 1546 | 2254-13 | similar to Arabidopsis thaliana male sterllity | C. elegans |
| | | protein 2 | |
| 1547 | 2254-17 | CLN3 protein | H. sapiens |
| 1548 | 2254-21 | YbgG | B. subtilis |
| 1549 | 2254-25 | peroxisomal protein | Synechocystis sp |
| 1550 | 2254-27 | Glutaminase | Rattus norvegicus |
| 1551 | 2254-30 | tartan protein | D. melanogaster |
| 1552 | 2254-33 | leucine zipper-EF-hand containing | H. sapiens |
| | | transmembrane protein 1 | |
| 1553 | 2254-39 | similar to helicase | C. elegens |
| 1554 | 2254-43 | muscle myosin heavy chain | D. melanogaster |
| 1555 | 2254-45 | putative nicotinate phosphoribosyltransferase | N. tabacum |
| 1556 | 2254-51 | 60S ribosomal protein | Mus musculus |
| 1557 | 2254-54 | small nuclear riboprotein Sm-D | H. sapiens |
| 1558 | 2254-55 | nucleoside diphosphate kinase | Salmo salar |
| 1559 | 2254-60 | serine protease | C. felis |
| 1560 | 2254-63 | myospheroid protein | D. melanogaster |
| 1561 | 2254-65 | Carboxylesterase | Anisopteromalus |
| | | | calandrae |
| 1562 | 2254-66 | siah binding protein 1 | H. sapiens |
| 1563 | 2254-70 | vacuolar ATPase, subunit M9.7 | Manduca sexta |
| 1564 | 2254-83 | Fumarylacetoacetate hydrolase | Rattus norvegicus |
| 1565 | 2254-84 | metalloproteinase 1 | Hydra vulgaris |
| 1566 | 2254-88 | alpha-spectrin | D. melanogaster |
| 1567 | 2254-93 | NADH dehydrogenase subunit 6 | D. melanogaster |
| 1568 | 2254-96 | cyclophilin isoform 5 | C. elegans |
| 1569 | 2255-5 | similar to mitochondrial ATPase inhibitors | C. elegans |
| 1570 | 2255-8 | yk391f12.5 | C. elegans |
| 1571 | 2255-12 | Unknown | H. sapiens |
| 1572 | 2255-17 | ribonucleotide reductase subunit M1 | M. musculus |
| 1573 | 2255-19 | docking protein | H. sapiens |
| 1574 | 2255-22 | Similar to rat 5E5 antigen | H. sapiens |
| 1575 | 2255-23 | ribosomal protein S31 | D., melanogaster |
| 1576 | 2255-25 | Similar to acyl-CoA dehydrogenase | C. elegans |
| 1577 | 2255-28 | Arginine tyrosine kinase | H. sapiens |
| 1578 | 2255-32 | ribosomal protein L7a | D., melanogaster |
| 1579 | 2255-33 | chS-Rex-s | G. gallus |
| 1580 | 2255-39 | Phosphoacetylglucosamine mutase | C. elegans |
| 1581 | 2255-41 | NADH dehydrogenase subunit 6 | D., melanogaster |
| 1582 | 2225-45 | tRNA-glutamine synthetase | C. elegans |
| 1583 | 2255-46 | p68 | M. musculus |
| 1584 | 2255-49 | ABC8 | M. musculus |
| 1585 | 2255-50 | kynurenine aminotransferase | R. rattus |
| 1586 | 2255-51 | SmD homolog {Gly-Arg repeat} | M. musculus |
| 1587 | 2255-56 | epoxide hydrolase | S. scrofa |
| 1588 | 2255-60 | Sec23 protein | H. sapiens |
| 1589 | 2255-62 | HMG CoA synthase | M. musculus |
| 1590 | 2255-63 | dipeptidyl aminopeptidase-like protein 6 | M. musculus |
| 1591 | 2255-66 | retinal rod Na+/Ca+, K+ exchanger | H. sapiens |
| 1592 | 2255-67 | 4-hydroxybutyrate coenzyme A transferase | C. elegans |
| 1593 | 2255-70 | hD54+ins2 isoform | H. sapiens |
| 1594 | 2255-73 | chromaffin granule ATPase II homolog | M. musculus |
| 1595 | 2255-77 | 40S ribosomal protein S10 | H. sapiens |
| 1596 | 2255-79 | 34/67 kD laminin binding protein | S. purpuratus |
| 1597 | 2255-82 | RNA-binding protein lark | D., melanogaster |
| 1598 | 2255-86 | thiol-specific antioxidant protein | R. norvegicus |
| 1599 | 2256-7 | Similar to Human estrogen-responsive finger | H. sapiens |
| | | protein | |
| 1600 | 2256-11 | Trypsin | C. felis |
| 1601 | 2256-12 | CEV14 | H. sapiens |
| 1602 | 2256-16 | AL021475 | C. elegans |
| 1603 | 2256-21 | Heterogenous Nuclear Ribonucleoprotein C1 | H. sapiens |
| 1604 | 2256-22 | b4 integrin interactor | H. sapiens |
| 1605 | 2256-28 | testis enhanced gene transcript protein | H. sapiens |
| 1606 | 2256-31 | synaptic vesicle protein 2B | R. norvagicus |
| 1607 | 2256-40 | TNF-alpha stimulated ABC protein | H. sapiens |
| 1608 | 2256-42 | carboxypeptidase A | H. armigera |
| 1609 | 2256-46 | pherophorin S | V. carteri |
| 1610 | 2256-52 | Fo-ATP synthase subunit b | D. melanogaster |
| 1611 | 2256-54 | PDGF associated protein | H. sapiens |
| 1612 | 2256-58 | S20 ribosomal protein | D. melanogaster |
| 1613 | 2256-64 | ribosomal protein S9 | H. sapiens |
| 1614 | 2256-69 | elongation factor 1-gamma | Artemia sp |
| 1615 | 2256-70 | conserved hypothetical protein | S. pombe |
| 1616 | 2256-72 | fructose 1,6 bisphosphate-aldolase 4C | D. melanogaster |
| 1617 | 2256-73 | troponin-T | D. melanogaster |
| 1618 | 2256-80 | SRP14 | C. femiliaris |
| 1619 | 2256-82 | succinyl-CoA synthetase alpha subunit | S. scrofa |
| 1620 | 2256-89 | Csa-19 | H. sapiens |
| 1621 | 2256-92 | Sacm21 | M. musculus |
| 1622 | 2256-94 | apoptosis inhibitor | Cydia pomonella |
| | | | granulosis virus |
| 1623 | 2256-96 | ribosomal protein L22 | D. melanogaster |

[0067] Table III represents a variety of flea HNC nucleic acid molecules of the present invention.

TABLE III

| SEQ ID NO: | Name |
|---|---|
| 567 | 2096-19NB.HNC |
| 568 | 2096-25NB.HNC |
| 569 | 2096-48NB.HNC |
| 570 | 2096-50NB.HNC |
| 571 | 2096-52NB.HNC |
| 572 | 2096-55NB.HNC |
| 573 | 2097-09NB.HNC |
| 574 | 2097-15NB.HNC |
| 575 | 2097-20NB.HNC |
| 576 | 2097-22NB.HNC |
| 577 | 2097-32NB.HNC |
| 578 | 2097-45NB.HNC |
| 579 | 2097-46NB.HNC |
| 580 | 2097-47NB.HNC |
| 581 | 2097-56NB.HNC |
| 582 | 2097-64NB.HNC |
| 583 | 2098-04NB.HNC |
| 584 | 2098-40NB.HNC |
| 585 | 2098-43NB.HNC |
| 586 | 2099-9NB.HNC |
| 587 | 2100-10NB.HNC |
| 588 | 2100-45NB.HNC |
| 589 | 2100-47NB.HNC |
| 590 | 2100-56NB.HNC |
| 591 | 2100-63NB.HNC |
| 592 | 2110-41NB.HNC |
| 593 | 2110-53NB.HNC |
| 594 | 2112-12NB.HNC |
| 595 | 2112-35NB.HNC |
| 596 | 2113-17NB.HNC |
| 597 | 2115-16NB.HNC |
| 598 | 2115-22NB.HNC |
| 599 | 2115-3NB.HNC |
| 600 | 2116-19NB.HNC |
| 601 | 2116-24NB.HNC |
| 602 | 2116-27NB.HNC |
| 603 | 2116-41NB.HNC |
| 604 | 2116-59NB.HNC |
| 605 | 2116-64NB.HNC |
| 606 | 2117-05NB.HNC |
| 607 | 2117-09NB.HNC |
| 608 | 2117-11NB.HNC |
| 609 | 2117-53NB.HNC |
| 610 | 2118-03NB.HNC |
| 611 | 2122-39NB.HNC |
| 612 | 2123-25NB.HNC |
| 613 | 2124-40NB.HNC |
| 614 | 2124-62NB.HNC |
| 615 | 2131-22NB.HNC |
| 616 | 2131-32NB.HNC |
| 617 | 2132-15NB.HNC |
| 618 | 2132-28NB.HNC |
| 619 | 2132-63NB.HNC |
| 620 | 2132-9NB.HNC |
| 621 | 2137-19NB.HNC |
| 622 | 2137-24NB.HNC |
| 623 | 2138-05NB.HNC |
| 624 | 2138-51NB.HNC |
| 625 | 2139-31NB.HNC |
| 626 | 2139-41NB.HNC |
| 627 | 2139-60NB.HNC |
| 628 | 2140-13NB.HNC |
| 629 | 2140-15NB.HNC |
| 630 | 2140-18NB.HNC |
| 631 | 2140-54NB.HNC |
| 632 | 2141-16NB.HNC |
| 633 | 2141-59NB.HNC |
| 634 | 2142-16NB.HNC |
| 635 | 2142-18NB.HNC |
| 636 | 2143-06NB.HNC |
| 637 | 2143-07NB.HNC |
| 638 | 2143-33NB.HNC |
| 639 | 2143-54NB.HNC |
| 640 | 2168-06NB.HNC |
| 641 | 2168-09NB.HNC |
| 642 | 2168-42NB.HNC |
| 643 | 2168-79NB.HNC |
| 644 | 2168-82NB.HNC |
| 645 | 2170-04NB.HNC |
| 646 | 2170-08NB.HNC |
| 647 | 2170-82NB.HNC |
| 648 | 2172-39NB.HNC |
| 649 | 2172-59NB.HNC |
| 650 | 2172-60NB.HNC |
| 651 | 2172-77NB.HNC |
| 652 | 2174-14NB.HNC |
| 653 | 2174-17NB.HNC |
| 654 | 2174-41NB.HNC |
| 655 | 2174-49NB.HNC |
| 656 | 2174-59NB.HNC |
| 657 | 2174-68NB.HNC |
| 658 | 2176-21NB.HNC |
| 659 | 2176-34NB.HNC |
| 660 | 2176-47NB.HNC |
| 661 | 2176-56NB.HNC |
| 662 | 2176-62NB.HNC |
| 663 | 2176-63NB.HNC |
| 664 | 2176-64NB.HNC |
| 665 | 2176-65NB.HNC |
| 666 | 2176-75NB.HNC |
| 667 | 2178-05NB.HNC |
| 668 | 2178-13NB.HNC |
| 669 | 2178-23NB.HNC |
| 670 | 2178-25NB.HNC |
| 671 | 2178-41NB.HNC |
| 672 | 2178-56NB.HNC |
| 673 | 2178-57NB.HNC |
| 674 | 2178-58NB.HNC |
| 675 | 2178-67NB.HNC |
| 676 | 2178-72NB.HNC |
| 677 | 2178-78NB.HNC |
| 678 | 2178-80NB.HNC |
| 679 | 2178-90NB.HNC |
| 680 | 2178-91NB.HNC |
| 681 | 2178-95NB.HNC |
| 682 | 2180-05NB.HNC |
| 683 | 2180-18NB.HNC |
| 684 | 2180-20NB.HNC |
| 685 | 2180-32NB.HNC |
| 686 | 2180-59NB.HNC |
| 687 | 2180-62NB.HNC |
| 688 | 2180-74NB.HNC |
| 689 | 2180-78NB.HNC |
| 690 | 2180-79NB.HNC |
| 691 | 2180-88NB.HNC |
| 692 | 2180-90NB.HNC |
| 693 | 2182-07NB.HNC |
| 694 | 2182-12NB.HNC |
| 695 | 2182-13NB.HNC |
| 696 | 2182-27NB.HNC |
| 697 | 2182-2NB.HNC |
| 698 | 2182-46NB.HNC |
| 699 | 2182-55NB.HNC |
| 700 | 2182-57NB.HNC |
| 701 | 2182-63NB.HNC |
| 702 | 2182-64NB.HNC |
| 703 | 2182-83NB.HNC |
| 704 | 2182-86NB.HNC |
| 705 | 2182-88NB.HNC |
| 706 | 2182-90NB.HNC |
| 707 | 2182-92NB.HNC |
| 708 | 2182-94NB.HNC |
| 709 | 2184-15NB.HNC |
| 710 | 2184-37NB.HNC |
| 711 | 2184-65NB.HNC |
| 712 | 2186-14NB.HNC |
| 713 | 2186-45NB.HNC |
| 714 | 2186-50NB.HNC |
| 715 | 2186-52NB.HNC |
| 716 | 2186-60NB.HNC |
| 717 | 2186-62NB.HNC |
| 718 | 2186-63NB.HNC |
| 719 | 2186-68NB.HNC |
| 720 | 2186-69NB.HNC |
| 721 | 2211-19NB.HNC |
| 722 | 2211-23NB.HNC |
| 723 | 2211-29NB.HNC |
| 724 | 2211-30NB.HNC |
| 725 | 2211-43NB.HNC |
| 726 | 2211-52NB.HNC |
| 727 | 2211-64NB.HNC |
| 728 | 2212-30NB.HNC |
| 729 | 2212-31NB.HNC |
| 730 | 2212-71NB.HNC |
| 731 | 2212-72NB.HNC |
| 732 | 2212-73NB.HNC |
| 733 | 2212-81NB.HNC |
| 734 | 2212-85NB.HNC |
| 735 | 2212-87NB.HNC |
| 736 | 2212-91NB.HNC |
| 737 | 2212-96NB.HNC |
| 738 | 2212-9NB.HNC |
| 739 | 2213-08NB.HNC |
| 740 | 2213-09NB.HNC |
| 741 | 2213-11NB.HNC |
| 742 | 2213-12NB.HNC |
| 743 | 2213-18NB.HNC |
| 744 | 2213-34NB.HNC |
| 745 | 2213-53NB.HNC |
| 746 | 2213-58NB.HNC |
| 747 | 2213-67NB.HNC |
| 748 | 2213-79NB.HNC |
| 749 | 2214-02NB.HNC |
| 750 | 2214-03NB.HNC |
| 751 | 2214-05NB.HNC |
| 752 | 2214-07NB.HNC |
| 753 | 2214-15NB.HNC |
| 754 | 2214-23NB.HNC |
| 755 | 2214-30NB.HNC |
| 756 | 2214-36NB.HNC |
| 757 | 2214-37NB.HNC |
| 758 | 2214-40NB.HNC |
| 759 | 2214-43NB.HNC |
| 760 | 2214-53NB.HNC |
| 761 | 2214-57NB.HNC |
| 762 | 2214-60NB.HNC |
| 763 | 2214-61NB.HNC |
| 764 | 2214-73NB.HNC |
| 765 | 2214-76NB.HNC |
| 766 | 2214-80NB.HNC |
| 767 | 2215-07NB.HNC |
| 768 | 2215-15NB.HNC |
| 769 | 2215-31NB.HNC |
| 770 | 2215-41NB.HNC |
| 771 | 2215-51NB.HNC |
| 772 | 2215-80NB.HNC |
| 773 | 2215-85NB.HNC |
| 774 | 2215-91NB.HNC |
| 775 | 2217-14NB.HNC |
| 776 | 2217-16NB.HNC |
| 777 | 2217-33NB.HNC |
| 778 | 2217-39NB.HNC |
| 779 | 2217-78NB.HNC |
| 780 | 2217-92NB.HNC |
| 781 | 2218-15NB.HNC |
| 782 | 2218-19NB.HNC |
| 783 | 2218-26NB.HNC |
| 784 | 2218-36NB.HNC |
| 785 | 2218-41NB.HNC |
| 786 | 2218-56NB.HNC |
| 787 | 2218-58NB.HNC |
| 788 | 2218-69NB.HNC |
| 789 | 2218-71NB.HNC |
| 790 | 2218-76NB.HNC |
| 791 | 2218-77NB.HNC |
| 792 | 2218-84NB.HNC |
| 793 | 2218-96NB.HNC |
| 794 | 2219-11NB.HNC |
| 795 | 2219-13NB.HNC |
| 796 | 2219-17NB.HNC |
| 797 | 2219-19NB.HNC |
| 798 | 2219-20NB.HNC |
| 799 | 2219-22NB.HNC |
| 800 | 2219-23NB.HNC |
| 801 | 2219-32NB.HNC |
| 802 | 2219-45NB.HNC |
| 803 | 2219-49NB.HNC |
| 804 | 2219-51NB.HNC |
| 805 | 2219-72NB.HNC |
| 806 | 2219-80NB.HNC |
| 807 | 2219-952122- |
| | 39NB.HNC |
| | 2220-02NB.HNC |
| 808 | 2220-02NB.HNC |
| 809 | 2220-27NB.HNC |
| 810 | 2220-32NB.HNC |
| 811 | 2220-53NB.HNC |
| 812 | 2220-60NB.HNC |
| 813 | 2220-66NB.HNC |
| 814 | 2221-06NB.HNC |
| 815 | 2221-15NB.HNC |
| 816 | 2221-18NB.HNC |
| 817 | 2221-20NB.HNC |
| 818 | 2221-24NB.HNC |
| 819 | 2221-45NB.HNC |
| 820 | 2221-46NB.HNC |
| 821 | 2221-48NB.HNC |
| 822 | 2221-54NB.HNC |
| 823 | 2221-55NB.HNC |
| 824 | 2221-59NB.HNC |
| 825 | 2221-61NB.HNC |
| 826 | 2221-62NB.HNC |
| 827 | 2221-70NB.HNC |
| 828 | 2221-86NB.HNC |
| 829 | 2221-87NB.HNC |
| 830 | 2221-95NB.HNC |
| 831 | 2223u-18NB.HNC |
| 832 | 2223u-22NB.HNC |
| 833 | 2223u-23NB.HNC |
| 834 | 2223u-31NB.HNC |
| 835 | 2223u-33NB.HNC |
| 836 | 2223u-36NB.HNC |
| 837 | 2223u-67NB.HNC |
| 838 | 2223u-85NB.HNC |
| 839 | 2224u-05NB.HNC |
| 840 | 2224u-07NB.HNC |
| 841 | 2224u-10NB.HNC |
| 842 | 2224u-11NB.HNC |
| 843 | 2224u-15NB.HNC |
| 844 | 2224u-25NB.HNC |
| 845 | 2224u-27NB.HNC |
| 846 | 2224u-44NB.HNC |
| 847 | 2224u-52NB.HNC |
| 848 | 2224u-62NB.HNC |
| 849 | 2224u-70NB.HNC |
| 850 | 2224u-71NB.HNC |
| 851 | 2224u-79NB.HNC |
| 852 | 2225u-11NB.HNC |
| 853 | 2225u-20NB.HNC |
| 854 | 2225u-23NB.HNC |
| 855 | 2225u-28NB.HNC |
| 856 | 2225u-55NB.HNC |
| 857 | 2225u-59NB.HNC |
| 858 | 2225u-64NB.HNC |
| 859 | 2225u-77NB.HNC |
| 860 | 2225u-95NB.HNC |
| 861 | 2226-932122- |
| | 39NB.HNC |
| 862 | 2226u-07NB.HNC |
| 863 | 2226u-19NB.HNC |
| 864 | 2226u-39NB.HNC |
| 865 | 2226u-45NB.HNC |
| 866 | 2226u-49NB.HNC |
| 867 | 2226u-54NB.HNC |
| 868 | 2226u-71NB.HNC |
| 869 | 2226u-77NB.HNC |
| 870 | 2226u-83NB.HNC |
| 871 | 2226u-91NB.HNC |
| 872 | 2227u-12NB.HNC |
| 873 | 2227u-13NB.HNC |
| 874 | 2227u-23NB.HNC |
| 875 | 2227u-26NB.HNC |
| 876 | 2227u-30NB.HNC |
| 877 | 2227u-31NB.HNC |
| 878 | 2227u-33NB.HNC |
| 879 | 2227u-43NB.HNC |
| 880 | 2227u-51NB.HNC |
| 881 | 2227u-60NB.HNC |
| 882 | 2227u-93NB.HNC |
| 883 | 2228u-04NB.HNC |
| 884 | 2228u-09NB.HNC |
| 885 | 2228u-12NB.HNC |
| 886 | 2228u-21NB.HNC |
| 887 | 2228u-26NB.HNC |
| 888 | 2228u-49NB.HNC |
| 889 | 2228u-54NB.HNC |
| 890 | 2228u-55NB.HNC |
| 891 | 2228u-61NB.HNC |
| 892 | 2228u-65NB.HNC |
| 893 | 2228u-79NB.HNC |
| 894 | 2228u-90NB.HNC |
| 1624 | 2222-7 |
| 1625 | 2222-16 |
| 1626 | 2222-19 |
| 1627 | 2222-39 |
| 1628 | 2222-56 |
| 1629 | 2222-59 |
| 1630 | 2222-79 |
| 1631 | 2222-89 |
| 1632 | 2228-4 |
| 1633 | 2228-9 |
| 1634 | 2228-12 |
| 1635 | 2228-21 |
| 1636 | 2228-26 |
| 1637 | 2228-49 |
| 1638 | 2228-54 |
| 1639 | 2228-61 |
| 1640 | 2228-65 |
| 1641 | 2228-79 |
| 1642 | 2228-90 |
| 1643 | 2245-5 |
| 1644 | 2245-7 |
| 1645 | 2245-15 |
| 1646 | 2245-16 |
| 1647 | 2225-17 |
| 1648 | 2245-20 |
| 1649 | 2245-35 |
| 1650 | 2245-38 |
| 1651 | 2245-39 |
| 1652 | 2245-51 |
| 1653 | 2245-52 |
| 1654 | 2245-57 |
| 1655 | 2246-13 |
| 1656 | 2246-19 |
| 1657 | 2246-25 |
| 1658 | 2246-27 |
| 1659 | 2246-29 |
| 1660 | 2246-40 |
| 1661 | 2246-45 |
| 1662 | 2246-52 |
| 1663 | 2246-64 |
| 1664 | 2246-66 |
| 1665 | 2246-74 |
| 1666 | 2246-82 |
| 1667 | 2247-6 |
| 1668 | 2247-17 |
| 1669 | 2247-29 |
| 1670 | 2247-31 |
| 1671 | 2247-36 |
| 1672 | 2247-40 |
| 1673 | 2247-46 |
| 1674 | 2247-50 |
| 1675 | 2247-54 |
| 1676 | 2247-63 |
| 1677 | 2247-66 |
| 1678 | 2247-68 |
| 1679 | 2247-69 |
| 1680 | 2247-81 |
| 1681 | 2247-82 |
| 1682 | 2247-95 |
| 1683 | 2248-7 |
| 1684 | 2248-18 |
| 1685 | 2248-32 |
| 1686 | 2248-41 |
| 1687 | 2248-50 |
| 1688 | 2248-54 |
| 1689 | 2248-60 |
| 1690 | 2248-62 |
| 1691 | 2248-65 |
| 1692 | 2248-86 |
| 1693 | 2248-94 |
| 1694 | 2249-6 |
| 1695 | 2249-30 |
| 1696 | 2249-35 |
| 1697 | 2249-36 |
| 1698 | 2249-68 |
| 1699 | 2249-74 |
| 1700 | 2249-79 |
| 1701 | 2250-20 |
| 1702 | 2250-24 |
| 1703 | 2251-7 |
| 1704 | 2251-21 |
| 1705 | 2251-25 |
| 1706 | 2251-38 |
| 1707 | 2251-58 |
| 1708 | 2252-7 |
| 1709 | 2252-15 |
| 1710 | 2252-19 |
| 1711 | 2252-24 |
| 1712 | 2252-26 |
| 1713 | 2252-27 |
| 1714 | 2252-32 |
| 1715 | 2252-36 |
| 1716 | 2252-37 |
| 1717 | 2252-69 |
| 1718 | 2252-78 |

[0068] Table IV represents a variety of flea HMT nucleic acid molecules of the present invention.

TABLE IV

| SEQ ID NO: | Name |
|---|---|
| 895 | 2084-02.HMTNB |
| 896 | 2084-05.HMTNB |
| 897 | 2084-07.HMTNB |
| 898 | 2084-09.HMTNB |
| 899 | 2084-15.HMTNB |
| 900 | 2084-17.HMTNB |
| 901 | 2084-18.HMTNB |
| 902 | 2084-21.HMTNB |
| 903 | 2084-22.HMTNB |
| 904 | 2084-30.HMTNB |
| 905 | 2084-33.HMTNB |
| 906 | 2084-36.HMTNB |
| 907 | 2084-37.HMTNB |
| 908 | 2084-38.HMTNB |
| 909 | 2084-39.HMTNB |
| 910 | 2084-43.HMTNB |
| 911 | 2084-50.HMTNB |
| 912 | 2084-54.HMTNB |
| 913 | 2084-56.HMTNB |
| 914 | 2084-59.HMTNB |
| 915 | 2085-03.HMTNB |
| 916 | 2085-13.HMTNB |
| 917 | 2085-35.HMTNB |
| 918 | 2085-38.HMTNB |
| 919 | 2085-39.HMTNB |
| 920 | 2085-49.HMTNB |
| 921 | 2085-53.HMTNB |
| 922 | 2085-58.HMTNB |
| 923 | 2085-61.HMTNB |
| 924 | 2086-05.HMTNB |
| 925 | 2086-10.HMTNB |
| 926 | 2086-13.HMTNB |
| 927 | 2086-15.HMTNB |
| 928 | 2086-20.HMTNB |
| 929 | 2086-25.HMTNB |
| 930 | 2086-32.HMTNB |
| 931 | 2086-33.HMTNB |
| 932 | 2086-34.HMTNB |
| 933 | 2086-37.HMTNB |
| 934 | 2086-41.HMTNB |
| 935 | 2086-43.HMTNB |
| 936 | 2086-44.HMTNB |
| 937 | 2086-54.HMTNB |
| 938 | 2086-55.HMTNB |
| 939 | 2086-58.HMTNB |
| 940 | 2087-09.HMTNB |
| 941 | 2087-17.HMTNB |
| 942 | 2087-28.HMTNB |
| 943 | 2087-33.HMTNB |
| 944 | 2087-35.HMTNB |
| 945 | 2087-51.HMTNB |
| 946 | 2087-54.HMTNB |
| 947 | 2088-07.HMTNB |
| 948 | 2088-17.HMTNB |
| 949 | 2088-35.HMTNB |
| 950 | 2088-52.HMTNB |
| 951 | 2088-59.HMTNB |
| 952 | 2089-12.HMTNB |
| 953 | 2089-14.HMTNB |
| 954 | 2089-33.HMTNB |
| 955 | 2089-36.HMTNB |
| 956 | 2089-51.HMTNB |
| 957 | 2089-60.HMTNB |
| 958 | 2090-11.HMTNB |
| 959 | 2090-27.HMTNB |
| 960 | 2090-33.HMTNB |
| 961 | 2090-44.HMTNB |
| 962 | 2090-57.HMTNB |
| 963 | 2091-11.HMTNB |
| 964 | 2091-22.HMTNB |
| 965 | 2091-23.HMTNB |
| 966 | 2091-35.HMTNB |
| 967 | 2091-63.HMTNB |
| 968 | 2092-11.HMTNB |
| 969 | 2092-16.HMTNB |
| 970 | 2092-40.HMTNB |
| 971 | 2092-42.HMTNB |
| 972 | 2092-46.HMTNB |
| 973 | 2092-60.HMTNB |
| 974 | 2093-20.HMTNB |
| 975 | 2093-23.HMTNB |
| 976 | 2093-43.HMTNB |
| 977 | 2093-48.HMTNB |
| 978 | 2093-50.HMTNB |
| 979 | 2093-62.HMTNB |
| 980 | 2093-63.HMTNB |
| 981 | 2094-08.HMTNB |
| 982 | 2094-26.HMTNB |
| 983 | 2094-33.HMTNB |
| 984 | 2094-47.HMTNB |
| 985 | 2094-50.HMTNB |
| 986 | 2094-62.HMTNB |
| 987 | 2095-04.HMTNB |
| 988 | 2095-10.HMTNB |
| 989 | 2095-12.HMTNB |
| 990 | 2095-13.HMTNB |
| 991 | 2095-15.HMTNB |
| 992 | 2095-20.HMTNB |
| 993 | 2095-22.HMTNB |
| 994 | 2095-31.HMTNB |
| 995 | 2095-33.HMTNB |
| 996 | 2095-34.HMTNB |
| 997 | 2095-36.HMTNB |
| 998 | 2095-40.HMTNB |
| 999 | 2095-48.HMTNB |
| 1000 | 2102-12.HMTNB |
| 1001 | 2102-16.HMTNB |
| 1002 | 2102-18.HMTNB |
| 1003 | 2102-19.HMTNB |
| 1004 | 2102-20.HMTNB |
| 1005 | 2102-29.HMTNB |
| 1006 | 2102-35.HMTNB |
| 1007 | 2102-37.HMTNB |
| 1008 | 2102-38.HMTNB |
| 1009 | 2102-41.HMTNB |
| 1010 | 2102-47.HMTNB |
| 1011 | 2103-02.HMTNB |
| 1012 | 2103-09.HMTNB |
| 1013 | 2103-45.HMTNB |
| 1014 | 2103-56.HMTNB |
| 1015 | 2103-58.HMTNB |
| 1016 | 2104-58.HMTNB |
| 1017 | 2104-60.HMTNB |
| 1018 | 2104-61.HMTNB |
| 1019 | 2105-02.HMTNB |
| 1020 | 2105-20.HMTNB |
| 1021 | 2105-35.HMTNB |
| 1022 | 2105-42.HMTNB |
| 1023 | 2105-44.HMTNB |
| 1024 | 2106-05.HMTNB |
| 1025 | 2106-27.HMTNB |
| 1026 | 2106-29.HMTNB |
| 1027 | 2106-34.HMTNB |
| 1028 | 2106-48.HMTNB |
| 1029 | 2106-50.HMTNB |
| 1030 | 2106-64.HMTNB |
| 1031 | 2107-02.HMTNB |
| 1032 | 2107-10.HMTNB |
| 1033 | 2107-37.HMTNB |
| 1034 | 2108-03.HMTNB |
| 1035 | 2108-23.HMTNB |
| 1036 | 2108-46.HMTNB |
| 1037 | 2108-47.HMTNB |
| 1038 | 2108-48.HMTNB |
| 1039 | 2108-49.HMTNB |
| 1040 | 2108-63.HMTNB |
| 1041 | 2109-04.HMTNB |
| 1042 | 2109-06.HMTNB |
| 1043 | 2109-37.HMTNB |
| 1044 | 2109-38.HMTNB |
| 1045 | 2109-44.HMTNB |
| 1046 | 2154-08.HMTNB |
| 1047 | 2154-09.HMTNB |
| 1048 | 2154-10.HMTNB |
| 1049 | 2154-28.HMTNB |
| 1050 | 2154-30.HMTNB |
| 1051 | 2154-45.HMTNB |
| 1052 | 2154-46.HMTNB |
| 1053 | 2154-61.HMTNB |
| 1054 | 2154-71.HMTNB |
| 1055 | 2154-81.HMTNB |
| 1056 | 2154-83.HMTNB |
| 1057 | 2156-02.HMTNB |
| 1058 | 2156-06.HMTNB |
| 1059 | 2156-18.HMTNB |
| 1060 | 2156-27.HMTNB |
| 1061 | 2156-43.HMTNB |
| 1062 | 2156-48.HMTNB |
| 1063 | 2156-50.HMTNB |
| 1064 | 2157-16.HMTNB |
| 1065 | 2157-34.HMTNB |
| 1066 | 2157-45.HMTNB |
| 1067 | 2157-70.HMTNB |
| 1068 | 2157-75.HMTNB |
| 1069 | 2157-79.HMTNB |
| 1070 | 2157-86.HMTNB |
| 1071 | 2158-02.HMTNB |
| 1072 | 2158-14.HMTNB |
| 1073 | 2158-19.HMTNB |
| 1074 | 2158-22.HMTNB |
| 1075 | 2158-27.HMTNB |
| 1076 | 2158-34.HMTNB |
| 1077 | 2158-37.HMTNB |
| 1078 | 2158-39.HMTNB |
| 1079 | 2159-07.HMTNB |
| 1080 | 2159-09.HMTNB |
| 1081 | 2159-17.HMTNB |
| 1082 | 2159-34.HMTNB |
| 1083 | 2159-35.HMTNB |
| 1084 | 2159-60.HMTNB |
| 1085 | 2160-16.HMTNB |
| 1086 | 2160-17.HMTNB |
| 1087 | 2160-29.HMTNB |
| 1088 | 2160-30.HMTNB |
| 1089 | 2160-32.HMTNB |
| 1090 | 2160-39.HMTNB |
| 1091 | 2160-49.HMTNB |
| 1092 | 2160-53.HMTNB |
| 1093 | 2160-54.HMTNB |
| 1094 | 2160-55.HMTNB |
| 1095 | 2160-77.HMTNB |
| 1096 | 2160-82.HMTNB |
| 1097 | 2160-89.HMTNB |
| 1098 | 2160-91.HMTNB |
| 1099 | 2161-13.HMTNB |
| 1100 | 2161-19.HMTNB |
| 1101 | 2161-45.HMTNB |
| 1102 | 2161-57.HMTNB |
| 1103 | 2161-60.HMTNB |
| 1104 | 2161-79.HMTNB |
| 1105 | 2161-83.HMTNB |
| 1106 | 2161-90.HMTNB |
| 1107 | 2161-94.HMTNB |
| 1108 | 2162-05.HMTNB |
| 1109 | 2162-12.HMTNB |
| 1110 | 2162-13.HMTNB |
| 1111 | 2162-18.HMTNB |
| 1112 | 2162-35.HMTNB |
| 1113 | 2162-41.HMTNB |
| 1114 | 2162-50.HMTNB |
| 1115 | 2162-59.HMTNB |
| 1116 | 2162-63.HMTNB |
| 1117 | 2162-71.HMTNB |
| 1118 | 2162-75.HMTNB |
| 1119 | 2162-78.HMTNB |
| 1120 | 2163-07.HMTNB |
| 1121 | 2163-11.HMTNB |
| 1122 | 2163-18.HMTNB |
| 1123 | 2163-23.HMTNB |
| 1124 | 2163-25.HMTNB |
| 1125 | 2163-43.HMTNB |
| 1126 | 2163-50.HMTNB |
| 1127 | 2163-61.HMTNB |
| 1128 | 2163-65.HMTNB |
| 1129 | 2163-73.HMTNB |
| 1130 | 2163-77.HMTNB |
| 1131 | 2163-87.HMTNB |
| 1132 | 2163-93.HMTNB |
| 1133 | 2163-95.HMTNB |
| 1134 | 2165-04.HMTNB |
| 1135 | 2165-06.HMTNB |
| 1136 | 2165-24.HMTNB |
| 1137 | 2165-45.HMTNB |
| 1138 | 2165-59.HMTNB |
| 1139 | 2165-65.HMTNB |
| 1140 | 2166-02.HMTNB |
| 1141 | 2166-12.HMTNB |
| 1142 | 2166-42.HMTNB |
| 1143 | 2166-46.HMTNB |
| 1144 | 2166-47.HMTNB |
| 1145 | 2167-07.HMTNB |
| 1146 | 2167-16.HMTNB |
| 1147 | 2167-42.HMTNB |
| 1148 | 2167-65.HMTNB |
| 1149 | 2167-66.HMTNB |
| 1150 | 2167-79.HMTNB |
| 1151 | 2167-90.HMTNB |
| 1152 | 2167-94.HMTNB |
| 1153 | 2169-05.HMTNB |
| 1154 | 2169-12.HMTNB |
| 1155 | 2169-16.HMTNB |
| 1156 | 2169-17.HMTNB |
| 1157 | 2169-19.HMTNB |
| 1158 | 2169-22.HMTNB |
| 1159 | 2169-26.HMTNB |
| 1160 | 2169-33.HMTNB |
| 1161 | 2169-42.HMTNB |
| 1162 | 2169-46.HMTNB |
| 1163 | 2169-47.HMTNB |
| 1164 | 2169-57.HMTNB |
| 1165 | 2169-69.HMTNB |
| 1166 | 2171-06.HMTNB |
| 1167 | 2171-09.HMTNB |
| 1168 | 2171-11.HMTNB |
| 1169 | 2171-29.HMTNB |
| 1170 | 2171-33.HMTNB |
| 1171 | 2171-35.HMTNB |
| 1172 | 2171-41.HMTNB |
| 1173 | 2171-54.HMTNB |
| 1174 | 2171-57.HMTNB |
| 1175 | 2171-69.HMTNB |
| 1176 | 2171-82.HMTNB |
| 1177 | 2171-84.HMTNB |
| 1178 | 2171-85.HMTNB |
| 1179 | 2173-12.HMTNB |
| 1180 | 2173-34.HMTNB |
| 1181 | 2173-42.HMTNB |
| 1182 | 2173-48.HMTNB |
| 1183 | 2173-54.HMTNB |
| 1184 | 2173-57.HMTNB |
| 1185 | 2173-75.HMTNB |
| 1186 | 2173-86.HMTNB |
| 1187 | 2173-91.HMTNB |
| 1188 | 2175-06.HMTNB |
| 1189 | 2175-15.HMTNB |
| 1190 | 2175-20.HMTNB |
| 1191 | 2175-58.HMTNB |
| 1192 | 2175-96.HMTNB |
| 1193 | 2177-16.HMTNB |
| 1194 | 2177-70.HMTNB |
| 1195 | 2177-86.HMTNB |
| 1196 | 2179-02.HMTNB |
| 1197 | 2179-03.HMTNB |
| 1198 | 2179-19.HMTNB |
| 1199 | 2179-22.HMTNB |
| 1200 | 2179-29.HMTNB |
| 1201 | 2179-39.HMTNB |
| 1202 | 2179-63.HMTNB |
| 1203 | 2181-04.HMTNB |
| 1204 | 2181-24.HMTNB |
| 1205 | 2181-35.HMTNB |
| 1206 | 2181-66.HMTNB |
| 1207 | 2181-75.HMTNB |
| 1208 | 2181-76.HMTNB |
| 1209 | 2181-84.HMTNB |
| 1210 | 2183-05.HMTNB |
| 1211 | 2183-13.HMTNB |
| 1212 | 2183-17.HMTNB |
| 1213 | 2183-28.HMTNB |
| 1214 | 2183-45.HMTNB |
| 1215 | 2183-50.HMTNB |
| 1216 | 2183-51.HMTNB |
| 1217 | 2183-70.HMTNB |
| 1218 | 2185-05.HMTNB |
| 1219 | 2185-10.HMTNB |
| 1220 | 2185-12.HMTNB |
| 1221 | 2185-18.HMTNB |
| 1222 | 2185-43.HMTNB |
| 1223 | 2185-49.HMTNB |
| 1224 | 2185-54.HMTNB |
| 1225 | 2185-82.HMTNB |
| 1226 | 2187-21.HMTNB |
| 1227 | 2187-37.HMTNB |
| 1228 | 2187-47.HMTNB |
| 1229 | 2187-93.HMTNB |
| 1230 | 2188-22.HMTNB |
| 1231 | 2188-29.HMTNB |
| 1232 | 2188-32.HMTNB |
| 1233 | 2188-52.HMTNB |
| 1234 | 2188-54.HMTNB |
| 1235 | 2188-72.HMTNB |
| 1236 | 2188-92.HMTNB |
| 1237 | 2189-31.HMTNB |
| 1238 | 2189-56.HMTNB |
| 1239 | 2189-75.HMTNB |
| 1240 | 2189-84.HMTNB |
| 1241 | 2191-23.HMTNB |
| 1242 | 2191-38.HMTNB |
| 1243 | 2191-58.HMTNB |
| 1244 | 2191-73.HMTNB |
| 1245 | 2191-77.HMTNB |
| 1246 | 2191-90.HMTNB |
| 1247 | 2191-94.HMTNB |
| 1248 | 2191-96.HMTNB |
| 1249 | 2192-03.HMTNB |
| 1250 | 2192-14.HMTNB |
| 1251 | 2192-36.HMTNB |
| 1252 | 2192-46.HMTNB |
| 1253 | 2192-88.HMTNB |
| 1254 | 2194-07.HMTNB |
| 1255 | 2194-13.HMTNB |
| 1256 | 2194-16.HMTNB |
| 1257 | 2194-18.HMTNB |
| 1258 | 2194-28.HMTNB |
| 1259 | 2195-06.HMTNB |
| 1260 | 2195-47.HMTNB |
| 1261 | 2195-60.HMTNB |
| 1262 | 2196-18.HMTNB |
| 1263 | 2196-30.HMTNB |
| 1264 | 2196-53.HMTNB |
| 1265 | 2196-65.HMTNB |
| 1266 | 2196-76.HMTNB |
| 1267 | 2197-28.HMTNB |
| 1268 | 2197-46.HMTNB |
| 1269 | 2197-51.HMTNB |
| 1270 | 2197-59.HMTNB |
| 1271 | 2202-96.HMTNB |
| 1272 | 2203-36.HMTNB |
| 1273 | 2204-09.HMTNB |
| 1274 | 2205-11.HMTNB |
| 1275 | 2205-33.HMTNB |
| 1276 | 2205-43.HMTNB |
| 1277 | 2205-85.HMTNB |
| 1278 | 2229-08u.HMTNB |
| 1279 | 2229-10u.HMTNB |
| 1280 | 2229-12u.HMTNB |
| 1281 | 2229-14u.HMTNB |
| 1282 | 2229-27u.HMTNB |
| 1283 | 2229-40u.HMTNB |
| 1284 | 2229-45u.HMTNB |
| 1285 | 2229-48u.HMTNB |
| 1286 | 2229-50u.HMTNB |
| 1287 | 2229-54u.HMTNB |
| 1288 | 2229-56u.HMTNB |
| 1289 | 2229-57u.HMTNB |
| 1290 | 2229-59u.HMTNB |
| 1291 | 2229-70u.HMTNB |
| 1292 | 2229-87u.HMTNB |
| 1293 | 2229-91u.HMTNB |
| 1294 | 2229-95u.HMTNB |
| 1295 | 2230-07u.HMTNB |
| 1296 | 2230-11u.HMTNB |
| 1297 | 2230-19u.HMTNB |
| 1298 | 2230-27u.HMTNB |
| 1299 | 2230-33u.HMTNB |
| 1300 | 2230-41u.HMTNB |
| 1301 | 2230-51u.HMTNB |
| 1302 | 2230-56u.HMTNB |
| 1303 | 2230-66u.HMTNB |
| 1304 | 2230-71u.HMTNB |
| 1305 | 2230-75.HMTNB |
| 1306 | 2230-81u.HMTNB |
| 1307 | 2230-84u.HMTNB |
| 1308 | 2230-93u.HMTNB |
| 1309 | 2231-23u.HMTNB |
| 1310 | 2231-26u.HMTNB |
| 1311 | 2231-32u.HMTNB |
| 1312 | 2231-37u.HMTNB |
| 1313 | 2231-44u.HMTNB |
| 1314 | 2231-50u.HMTNB |
| 1315 | 2231-51u.HMTNB |
| 1316 | 2231-63u.HMTNB |
| 1317 | 2231-68u.HMTNB |
| 1318 | 2231-74u.HMTNB |
| 1319 | 2231-82u.HMTNB |
| 1320 | 2231-85u.HMTNB |
| 1321 | 2231-88u.HMTNB |
| 1322 | 2231-94u.HMTNB |
| 1323 | 2231-95u.HMTNB |
| 1324 | 2232-03u.HMTNB |
| 1325 | 2232-11u.HMTNB |
| 1326 | 2232-19u.HMTNB |
| 1327 | 2232-25u.HMTNB |
| 1328 | 2232-30u.HMTNB |
| 1329 | 2232-44u.HMTNB |
| 1330 | 2232-50u.HMTNB |
| 1331 | 2232-56u.HMTNB |
| 1332 | 2232-60u.HMTNB |
| 1333 | 2232-64u.HMTNB |
| 1334 | 2232-71u.HMTNB |
| 1335 | 2232-73u.HMTNB |
| 1336 | 2232-80u.HMTNB |
| 1337 | 2232-83u.HMTNB |
| 1338 | 2233-02u.HMTNB |
| 1339 | 2233-53u.HMTNB |
| 1340 | 2233-57u.HMTNB |
| 1341 | 2233-58u.HMTNB |
| 1342 | 2233-80u.HMTNB |
| 1343 | 2233-81u.HMTNB |
| 1344 | 2233-83u.HMTNB |
| 1345 | 2234-02u.HMTNB |
| 1346 | 2234-03u.HMTNB |
| 1347 | 2234-05u.HMTNB |
| 1348 | 2234-06u.HMTNB |
| 1349 | 2234-09u.HMTNB |
| 1350 | 2234-12u.HMTNB |
| 1351 | 2234-23u.HMTNB |
| 1352 | 2234-26u.HMTNB |
| 1353 | 2234-46u.HMTNB |
| 1354 | 2234-66u.HMTNB |
| 1355 | 2234-67u.HMTNB |
| 1356 | 2234-70u.HMTNB |
| 1357 | 2234-74u.HMTNB |
| 1358 | 2234-77u.HMTNB |
| 1359 | 2234-82u.HMTNB |
| 1360 | 2234-88u.HMTNB |
| 1361 | 2234-89u.HMTNB |
| 1362 | 2234-90u.HMTNB |
| 1363 | 2234-93u.HMTNB |
| 1364 | 2240-39 |
| 1365 | 2240-40 |
| 1366 | 2240-49 |
| 1367 | 2240-51 |
| 1368 | 2240-57 |
| 1369 | 2240-61 |
| 1370 | 2240-62 |
| 1371 | 2241-2 |
| 1372 | 2241-3 |
| 1373 | 2241-8 |
| 1374 | 2241-9 |
| 1375 | 2241-13 |
| 1376 | 2241-21 |
| 1377 | 2241-29 |
| 1378 | 2241-38 |
| 1379 | 2241-45 |
| 1380 | 2241-49 |
| 1381 | 2241-51 |
| 1382 | 2241-57 |
| 1383 | 2241-63 |
| 1384 | 2241-68 |
| 1385 | 2241-89 |
| 1386 | 2241-91 |
| 1387 | 2243-2 |
| 1388 | 2243-3 |
| 1389 | 2243-12 |
| 1390 | 2243-14 |
| 1391 | 2243-19 |
| 1392 | 2243-24 |
| 1393 | 2243-25 |
| 1394 | 2243-33 |
| 1395 | 2243-49 |
| 1396 | 2243-50 |
| 1397 | 2243-51 |
| 1398 | 2243-59 |
| 1399 | 2243-63 |
| 1400 | 2243-69 |
| 1401 | 2243-74 |
| 1402 | 2243-75 |
| 1403 | 2243-77 |
| 1404 | 2244-19 |
| 1405 | 2244-26 |
| 1406 | 2244-35 |
| 1407 | 2244-38 |
| 1408 | 2244-40 |
| 1409 | 2244-47 |
| 1410 | 2244-52 |
| 1411 | 2244-57 |
| 1412 | 2244-63 |
| 1413 | 2244-68 |
| 1414 | 2244-77 |
| 1415 | 2244-80 |

[0069] In one embodiment, a gene or other nucleic acid molecule of the present invention can be an allelic variant that includes a similar but not identical sequence to SEQ ID NO:1, SEQ ID NO:3, SEQ ID NO:4, SEQ ID NO:6, SEQ ID NO:7, SEQ ID NO:9, SEQ ID NO:10, SEQ ID NO:12, SEQ ID NO:13, SEQ ID NO:15, SEQ ID NO:16, SEQ ID NO:18, SEQ ID NO:19, SEQ ID NO:21, SEQ ID NO:22, SEQ ID NO:24, SEQ ID NO:25, SEQ ID NO:27, SEQ ID NO:28, SEQ ID NO:30, SEQ ID NO:31, SEQ ID NO:33, SEQ ID NO:34, SEQ ID NO:36, SEQ ID NO:37, SEQ ID NO:39, SEQ ID NO:40, SEQ ID NO:42, SEQ ID NO:43, SEQ ID NO:45, SEQ ID NO:46, SEQ ID NO:48, SEQ ID NO:153, SEQ ID NO:155, SEQ ID NO:156, SEQ ID NO:158, SEQ ID NO:159, SEQ ID NO:161, SEQ ID NO:162, SEQ ID NO:164, SEQ ID NO:165, SEQ ID NO:167, SEQ ID NO:168, SEQ ID NO:170, SEQ ID NO:1859, SEQ ID NO:1860, SEQ ID NO:1861, SEQ ID NO:1863, SEQ ID NO:1864, SEQ ID NO:1866, SEQ ID NO:1867, SEQ ID NO:1869, SEQ ID NO:1870, SEQ ID NO:1871, SEQ ID NO:1872, SEQ ID NO:1874, SEQ ID NO:1875, SEQ ID NO:1876, SEQ ID NO:1877, SEQ ID NO:1878, SEQ ID NO:1880, SEQ ID NO:1881, SEQ ID NO:1882, SEQ ID NO:1884, SEQ ID NO:1885, SEQ ID NO:1886, SEQ ID NO:1887, SEQ ID NO:1889, SEQ ID NO:1890, SEQ ID NO:1891, SEQ ID NO:1892, SEQ ID NO:1893, SEQ ID NO:1894, SEQ ID NO:1895, SEQ ID NO:1896, SEQ ID NO:1898, SEQ ID NO:1899, SEQ ID NO:1900, SEQ ID NO:1901, SEQ ID NO:1903, SEQ ID NO:1904, SEQ ID NO:1905, SEQ ID NO:1906, SEQ ID NO:1907, SEQ ID NO:1908, SEQ ID NO:1909, SEQ ID NO:1910, SEQ ID NO:1911, SEQ ID NO:1912, SEQ ID NO:1913, SEQ ID NO:1914, SEQ ID NO:1916, SEQ ID NO:1917, SEQ ID NO:1918, SEQ ID NO:1919, SEQ ID NO:1921, SEQ ID NO:1922, SEQ ID NO:1923, SEQ ID NO:1924, SEQ ID NO:1926, SEQ ID NO:1927, SEQ ID NO:1928, SEQ ID NO:1929, and/or SEQ ID NO:1931 or a C. felis nucleic acid sequence of Table I, Table II, Table III and/or Table IV or a complement thereof. For example, an allelic variant of a C. felis ALN gene including SEQ ID NO:1 is a gene that occurs at essentially the same locus (or loci) in the genome as the gene including SEQ ID NO:1, but which, due to natural variations caused by, for example, mutation or recombination, has a similar but not identical sequence. Because natural selection typically selects against alterations that affect function, allelic variants (i.e. alleles corresponding to, or of, cited nucleic acid sequences) usually encode proteins having similar activity to that of the protein encoded by the gene to which they are being compared. Allelic variants of genes or nucleic acid molecules can also comprise alterations in the 5′ or 3′ untranslated regions of the gene (e.g., in regulatory control regions), or can involve alternative splicing of a nascent transcript, thereby bringing alternative exons into juxtaposition. Allelic variants are well known to those skilled in the art and would be expected to occur naturally within a given flea such as C. felis, since the genome is diploid, and sexual reproduction will result in the reassortment of alleles. For example, SEQ ID NO:162 is apparently an allelic variant or multiple gene of SEQ ID NO:153.

[0070] In one embodiment of the present invention, isolated HMT and HNC proteins are encoded by nucleic acid molecules that hybridize under stringent hybridization conditions to genes or other nucleic acid molecules encoding flea HMT and HNC proteins, respectively. The minimal size of HMT and HNC proteins of the present invention is a size sufficient to be encoded by a nucleic acid molecule capable of forming a stable hybrid (i.e., hybridizing under stringent hybridization conditions) with the complementary sequence of a nucleic acid molecule encoding the corresponding natural protein. The size of a nucleic acid molecule encoding such a protein is dependent on the nucleic acid composition and the percent homology between the flea HMT or HNC nucleic acid molecule and the complementary nucleic acid sequence. It can easily be understood that the extent of homology required to form a stable hybrid under stringent conditions can vary depending on whether the homologous sequences are interspersed throughout a given nucleic acid molecule or are clustered (i.e., localized) in distinct regions on a given nucleic acid molecule.

[0071] The minimal size of a nucleic acid molecule capable of forming a stable hybrid with a gene encoding a flea HMT or HNC protein is typically at least about 12 to about 15 nucleotides in length if the nucleic acid molecule is GC-rich and at least about 15 to about 17 bases in length if it is AT-rich. The minimal size of a nucleic acid molecule used to encode an HMT or HNC protein homologue of the present invention is from about 12 to about 18 nucleotides in length. Thus, the minimal size of HMT or HNC protein homologues of the present invention is from about 4 to about 6 amino acids in length. There is no limit, other than a practical limit, on the maximal size of a nucleic acid molecule encoding a flea HMT or HNC protein of the present invention because a nucleic acid molecule of the present invention can include a portion of a gene, an entire gene, or multiple genes. The preferred size of a protein encoded by a nucleic acid molecule of the present invention depends on whether a full-length, fusion, multivalent, or functional portion of such a protein is desired.

[0072] Stringent hybridization conditions are determined based on defined physical properties of the gene to which the nucleic acid molecule is being hybridized, and can be defined mathematically. Stringent hybridization conditions are those experimental parameters that allow an individual skilled in the art to identify significant similarities between heterologous nucleic acid molecules. These conditions are well known to those skilled in the art. See, for example, Sambrook, et al., 1989, Molecular Cloning: A Laboratory Manual, Cold Spring Harbor Labs Press, and Meinkoth, et al., 1984, Anal. Biochem. 138, 267-284, each of which is incorporated by reference herein in its entirety. As explained in detail in the cited references, the determination of hybridization conditions involves the manipulation of a set of variables including the ionic strength (M, in moles/liter), the hybridization temperature (° C.), the concentration of nucleic acid helix destabilizing agents (such as formamide), the average length of the shortest hybrid duplex (n), and the percent G+C composition of the fragment to which an unknown nucleic acid molecule is being hybridized. For nucleic acid molecules of at least about 150 nucleotides, these variables are inserted into a standard mathematical formula to calculate the melting temperature, or Tₘ, of a given nucleic acid molecule. As defined in the formula below, Tₘ is the temperature at which two complementary nucleic acid molecule strands will disassociate, assuming 100% complementarity between the two strands:

Tₘ=81.5° C.+16.6 log M+0.41(%G+C)−500/n−0.61(% formamide).

For nucleic acid molecules smaller than about 50 nucleotides, hybrid stability is defined by the dissociation temperature (T_{d}), which is defined as the temperature at which 50% of the duplexes dissociate. For these smaller molecules, the stability at a standard ionic strength is defined by the following equation:

T_{d}=4(G+C)+2(A+T).

A temperature of 5° C. below T_{d} is used to detect hybridization between perfectly matched molecules.

[0073] Also well known to those skilled in the art is how base pair mismatch, i.e. differences between two nucleic acid molecules being compared, including non-complementarity of bases at a given location, and gaps due to insertion or deletion of one or more bases at a given location on either of the nucleic acid molecules being compared, will affect Tₘ or T_{d} for nucleic acid molecules of different sizes. For example, Tₘ decreases about 1° C. for each 1% of mismatched base pairs for hybrids greater than about 150 bp, and T_{d} decreases about 5° C. for each mismatched base pair for hybrids below about 50 bp. Conditions for hybrids between about 50 and about 150 base pairs can be determined empirically and without undue experimentation using standard laboratory procedures well known to those skilled in the art. These simple procedures allow one skilled in the art to set the hybridization conditions (by altering, for example, the salt concentration, the formamide concentration or the temperature) so that only nucleic acid hybrids with greater than a specified % base pair mismatch will hybridize. Stringent hybridization conditions are commonly understood by those skilled in the art to be those experimental conditions that will allow less than or equal to about 30% base pair mismatch (i.e., at least about 70% identity). Because one skilled in the art can easily determine whether a given nucleic acid molecule to be tested is less than or greater than about 50 nucleotides, and can therefore choose the appropriate formula for determining hybridization conditions, he or she can determine whether the nucleic acid molecule will hybridize with a given gene under stringent hybridization conditions and similarly whether the nucleic acid molecule will hybridize under conditions designed to allow a desired amount of base pair mismatch.

[0074] Hybridization reactions are often carried out by attaching the nucleic acid molecule to be hybridized to a solid support such as a membrane, and then hybridizing with a labeled nucleic acid molecule, typically referred to as a probe, suspended in a hybridization solution. Examples of common hybridization reaction techniques include, but are not limited to, the well-known Southern and northern blotting procedures. Typically, the actual hybridization reaction is done under non-stringent conditions, i.e., at a lower temperature and/or a higher salt concentration, and then high stringency is achieved by washing the membrane in a solution with a higher temperature and/or lower salt concentration in order to achieve the desired stringency.

[0075] For example, if the skilled artisan wished to identify a nucleic acid molecule that hybridizes under conditions that would allow less than or equal to 30% pair mismatch with a flea nucleic acid molecule of about 150 bp in length or greater, the following conditions could preferably be used. The average G+C content of flea DNA is about 37%, as calculated from known flea nucleic acid sequences. The unknown nucleic acid molecules would be attached to a support membrane, and the 150 bp probe would be labeled, e.g. with a radioactive tag. The hybridization reaction could be carried out in a solution comprising 2×SSC and 0% formamide, at a temperature of about 37° C. (low stringency conditions). Solutions of differing concentrations of SSC can be made by one of skill in the art by diluting a stock solution of 20×SSC (175.3 gram NaCl and about 88.2 gram sodium citrate in 1 liter of water, pH 7) to obtain the desired concentration of SSC. The skilled artisan would calculate the washing conditions required to allow up to 30% base pair mismatch. For example, in a wash solution comprising 1×SSC and 0% formamide, the Tₘ of perfect hybrids would be about 77° C.:

81.5° C.+16.6 log(0.15M)+(0.41×0.37)−(500/150)−(0.61×0)=77.5° C.

Thus, to achieve hybridization with nucleic acid molecules having about 30% base pair mismatch, hybridization washes would be carried out at a temperature of less than or equal to 47.5° C. It is thus within the skill of one in the art to calculate additional hybridization temperatures based on the desired percentage base pair mismatch, formulae and G/C content disclosed herein. For example, it is appreciated by one skilled in the art that as the nucleic acid molecule to be tested for hybridization against nucleic acid molecules of the present invention having sequences specified herein becomes longer than 150 nucleotides, the Tₘ for a hybridization reaction allowing up to 30% base pair mismatch will not vary significantly from 47.5° C.

[0076] Furthermore, it is known in the art that there are commercially available computer programs for determining the degree of similarity between two nucleic acid sequences. These computer programs include various known methods to determine the percentage identity and the number and length of gaps between hybrid nucleic acid molecules. Preferred methods to determine the percent identity among amino acid sequences and also among nucleic acid sequences include analysis using one or more of the commercially available computer programs designed to compare and analyze nucleic acid or amino acid sequences. These computer programs include, but are not limited to, the Wisconsin Package Version 9.0 sequence analysis software, available from Genetics Computer Group (GCG), Madison, Wis., DNASIS®, available from Hitachi Software, San Bruno, Calif., and MACVECTOR™, available from the Eastman Kodak Company, New Haven, Conn. A preferred method to determine percent identity among amino acid sequences and also among nucleic acid sequences includes using the GAP program with pair-wise comparisons within the GCG® Wisconsin Package Version 9.0 sequence analysis software, hereinafter referred to as default parameters.

[0077] One embodiment of the present invention includes flea ALN, CBP, NKAB, LGIC, ANON, MALV, OS-D, NMDA, CLBP, NAH, CLIC, PL2, PL3, PL4, SVP, VGCC, AUP, and 7B2 proteins. A preferred flea ALN protein includes a protein encoded by a nucleic acid molecule that hybridizes under conditions that preferably allow less than or equal to about 30% base pair mismatch, more preferably under conditions that allow less than or equal to about 25% base pair mismatch, more preferably under conditions that allow less than or equal to about 20% base pair mismatch, more preferably under conditions that allow less than or equal to about 15% base pair mismatch, more preferably under conditions that allow less than or equal to about 10% base pair mismatch and even more preferably under conditions that allow less than or equal to about 5% base pair mismatch with a nucleic acid molecule selected from the group consisting of SEQ ID NO:3 and SEQ ID NO:6.

[0078] A preferred flea CBP protein includes a protein encoded by a nucleic acid molecule that hybridizes under conditions that preferably allow less than or equal to about 30% base pair mismatch, more preferably under conditions that allow less than or equal to about 25% base pair mismatch, more preferably under conditions that allow less than or equal to about 20% base pair mismatch, more preferably under conditions that allow less than or equal to about 15% base pair mismatch, more preferably under conditions that allow less than or equal to about 10% base pair mismatch and even more preferably under conditions that allow less than or equal to about 5% base pair mismatch with a nucleic acid molecule selected from the group consisting of SEQ ID NO:9 and SEQ ID NO:12.

[0079] A preferred flea NKAB protein includes a protein encoded by a nucleic acid molecule that hybridizes under conditions that preferably allow less than or equal to about 30% base pair mismatch, more preferably under conditions that allow less than or equal to about 25% base pair mismatch, more preferably under conditions that allow less than or equal to about 20% base pair mismatch, more preferably under conditions that allow less than or equal to about 15% base pair mismatch, more preferably under conditions that allow less than or equal to about 10% base pair mismatch and even more preferably under conditions that allow less than or equal to about 5% base pair mismatch with a nucleic acid molecule selected from the group consisting of SEQ ID NO:15 and SEQ ID NO:18.

[0080] A preferred flea LGIC protein includes a protein encoded by a nucleic acid molecule that hybridizes under conditions that preferably allow less than or equal to about 30% base pair mismatch, more preferably under conditions that allow less than or equal to about 25% base pair mismatch, more preferably under conditions that allow less than or equal to about 20% base pair mismatch, more preferably under conditions that allow less than or equal to about 15% base pair mismatch, more preferably under conditions that allow less than or equal to about 10% base pair mismatch and even more preferably under conditions that allow less than or equal to about 5% base pair mismatch with a nucleic acid molecule selected from the group consisting of SEQ ID NO:21 and SEQ ID NO:24; SEQ ID NO:1860, SEQ ID NO:1863, and SEQ ID NO:1866.

[0081] A preferred flea ANON protein includes a protein encoded by a nucleic acid molecule that hybridizes under conditions that preferably allow less than or equal to about 30% base pair mismatch, more preferably under conditions that allow less than or equal to about 25% base pair mismatch, more preferably under conditions that allow less than or equal to about 20% base pair mismatch, more preferably under conditions that allow less than or equal to about 15% base pair mismatch, more preferably under conditions that allow less than or equal to about 10% base pair mismatch and even more preferably under conditions that allow less than or equal to about 5% base pair mismatch with a nucleic acid molecule selected from the group consisting of SEQ ID NO:27 and SEQ ID NO:30.

[0082] A preferred flea MALV protein includes a protein encoded by a nucleic acid molecule that hybridizes under conditions that preferably allow less than or equal to about 30% base pair mismatch, more preferably under conditions that allow less than or equal to about 25% base pair mismatch, more preferably under conditions that allow less than or equal to about 20% base pair mismatch, more preferably under conditions that allow less than or equal to about 15% base pair mismatch, more preferably under conditions that allow less than or equal to about 10% base pair mismatch and even more preferably under conditions that allow less than or equal to about 5% base pair mismatch with a nucleic acid molecule selected from the group consisting of SEQ ID NO:33 and SEQ ID NO:36.

[0083] A preferred flea OS-D protein includes a protein encoded by a nucleic acid molecule that hybridizes under conditions that preferably allow less than or equal to about 30% base pair mismatch, more preferably under conditions that allow less than or equal to about 25% base pair mismatch, more preferably under conditions that allow less than or equal to about 20% base pair mismatch, more preferably under conditions that allow less than or equal to about 15% base pair mismatch, more preferably under conditions that allow less than or equal to about 10% base pair mismatch and even more preferably under conditions that allow less than or equal to about 5% base pair mismatch with a nucleic acid molecule selected from the group consisting of SEQ ID NO:39 and SEQ ID NO:42.

[0084] A preferred flea NMDA protein includes a protein encoded by a nucleic acid molecule that hybridizes under conditions that preferably allow less than or equal to about 30% base pair mismatch, more preferably under conditions that allow less than or equal to about 25% base pair mismatch, more preferably under conditions that allow less than or equal to about 20% base pair mismatch, more preferably under conditions that allow less than or equal to about 15% base pair mismatch, more preferably under conditions that allow less than or equal to about 10% base pair mismatch and even more preferably under conditions that allow less than or equal to about 5% base pair mismatch with a nucleic acid molecule selected from the group consisting of SEQ ID NO:45 and SEQ ID NO:48.

[0085] A preferred flea CLBP protein includes a protein encoded by a nucleic acid molecule that hybridizes under conditions that preferably allow less than or equal to about 30% base pair mismatch, more preferably under conditions that allow less than or equal to about 25% base pair mismatch, more preferably under conditions that allow less than or equal to about 20% base pair mismatch, more preferably under conditions that allow less than or equal to about 15% base pair mismatch, more preferably under conditions that allow less than or equal to about 10% base pair mismatch and even more preferably under conditions that allow less than or equal to about 5% base pair mismatch with a nucleic acid molecule selected from the group consisting of SEQ ID NO:155, SEQ ID NO:158, SEQ ID NO:161, SEQ ID NO:164, SEQ ID NO:167 and SEQ ID NO:170.

[0086] A preferred flea NAH protein includes a protein encoded by a nucleic acid molecule that hybridizes under conditions that preferably allow less than or equal to about 30% base pair mismatch, more preferably under conditions that allow less than or equal to about 25% base pair mismatch, more preferably under conditions that allow less than or equal to about 20% base pair mismatch, more preferably under conditions that allow less than or equal to about 15% base pair mismatch, more preferably under conditions that allow less than or equal to about 10% base pair mismatch and even more preferably under conditions that allow less than or equal to about 5% base pair mismatch with a nucleic acid molecule selected from the group consisting of SEQ ID NO:1869 and SEQ ID NO:1871.

[0087] A preferred flea CLIC protein includes a protein encoded by a nucleic acid molecule that hybridizes under conditions that preferably allow less than or equal to about 30% base pair mismatch, more preferably under conditions that allow less than or equal to about 25% base pair mismatch, more preferably under conditions that allow less than or equal to about 20% base pair mismatch, more preferably under conditions that allow less than or equal to about 15% base pair mismatch, more preferably under conditions that allow less than or equal to about 10% base pair mismatch and even more preferably under conditions that allow less than or equal to about 5% base pair mismatch with a nucleic acid molecule selected from the group consisting of SEQ ID NO:1874 and SEQ ID NO:1876.

[0088] A preferred flea PL2 protein includes a protein encoded by a nucleic acid molecule that hybridizes under conditions that preferably allow less than or equal to about 30% base pair mismatch, more preferably under conditions that allow less than or equal to about 25% base pair mismatch, more preferably under conditions that allow less than or equal to about 20% base pair mismatch, more preferably under conditions that allow less than or equal to about 15% base pair mismatch, more preferably under conditions that allow less than or equal to about 10% base pair mismatch and even more preferably under conditions that allow less than or equal to about 5% base pair mismatch with a nucleic acid molecule selected from the group consisting of SEQ ID NO:1879, SEQ ID NO:1881, SEQ ID NO:1884, and SEQ ID NO:1886.

[0089] A preferred flea CPL3 protein includes a protein encoded by a nucleic acid molecule that hybridizes under conditions that preferably allow less than or equal to about 30% base pair mismatch, more preferably under conditions that allow less than or equal to about 25% base pair mismatch, more preferably under conditions that allow less than or equal to about 20% base pair mismatch, more preferably under conditions that allow less than or equal to about 15% base pair mismatch, more preferably under conditions that allow less than or equal to about 10% base pair mismatch and even more preferably under conditions that allow less than or equal to about 5% base pair mismatch with a nucleic acid molecule selected from the group consisting of SEQ ID NO:1889 and SEQ ID NO:1891.

[0090] A preferred flea PL4 protein includes a protein encoded by a nucleic acid molecule that hybridizes under conditions that preferably allow less than or equal to about 30% base pair mismatch, more preferably under conditions that allow less than or equal to about 25% base pair mismatch, more preferably under conditions that allow less than or equal to about 20% base pair mismatch, more preferably under conditions that allow less than or equal to about 15% base pair mismatch, more preferably under conditions that allow less than or equal to about 10% base pair mismatch and even more preferably under conditions that allow less than or equal to about 5% base pair mismatch with a nucleic acid molecule selected from the group consisting of SEQ ID NO:1893, SEQ ID NO:1895, SEQ ID NO:1898, and SEQ ID NO:1900.

[0091] A preferred flea SVP protein includes a protein encoded by a nucleic acid molecule that hybridizes under conditions that preferably allow less than or equal to about 30% base pair mismatch, more preferably under conditions that allow less than or equal to about 25% base pair mismatch, more preferably under conditions that allow less than or equal to about 20% base pair mismatch, more preferably under conditions that allow less than or equal to about 15% base pair mismatch, more preferably under conditions that allow less than or equal to about 10% base pair mismatch and even more preferably under conditions that allow less than or equal to about 5% base pair mismatch with a nucleic acid molecule selected from the group consisting of SEQ ID NO:1903 and SEQ ID NO:1905.

[0092] A preferred flea VGCC protein includes a protein encoded by a nucleic acid molecule that hybridizes under conditions that preferably allow less than or equal to about 30% base pair mismatch, more preferably under conditions that allow less than or equal to about 25% base pair mismatch, more preferably under conditions that allow less than or equal to about 20% base pair mismatch, more preferably under conditions that allow less than or equal to about 15% base pair mismatch, more preferably under conditions that allow less than or equal to about 10% base pair mismatch and even more preferably under conditions that allow less than or equal to about 5% base pair mismatch with a nucleic acid molecule selected from the group consisting of SEQ ID NO:1907, SEQ ID NO:1909, SEQ ID NO:1911, SEQ ID NO:1913, SEQ ID NO:1916, and SEQ ID NO:1918.

[0093] A preferred flea AUP protein includes a protein encoded by a nucleic acid molecule that hybridizes under conditions that preferably allow less than or equal to about 30% base pair mismatch, more preferably under conditions that allow less than or equal to about 25% base pair mismatch, more preferably under conditions that allow less than or equal to about 20% base pair mismatch, more preferably under conditions that allow less than or equal to about 15% base pair mismatch, more preferably under conditions that allow less than or equal to about 10% base pair mismatch and even more preferably under conditions that allow less than or equal to about 5% base pair mismatch with a nucleic acid molecule selected from the group consisting of SEQ ID NO:1921 and SEQ ID NO:1923.

[0094] A preferred flea 7B2 protein includes a protein encoded by a nucleic acid molecule that hybridizes under conditions that preferably allow less than or equal to about 30% base pair mismatch, more preferably under conditions that allow less than or equal to about 25% base pair mismatch, more preferably under conditions that allow less than or equal to about 20% base pair mismatch, more preferably under conditions that allow less than or equal to about 15% base pair mismatch, more preferably under conditions that allow less than or equal to about 10% base pair mismatch and even more preferably under conditions that allow less than or equal to about 5% base pair mismatch with a nucleic acid molecule selected from the group consisting of SEQ ID NO:1926, SEQ ID NO:1928, and SEQ ID NO:1931.

[0095] A preferred flea HMT and/or HNC protein includes a protein encoded by a nucleic acid molecule that hybridizes under conditions that preferably allow less than or equal to about 30% base pair mismatch, more preferably under conditions that allow less than or equal to about 25% base pair mismatch, more preferably under conditions that allow less than or equal to about 20% base pair mismatch, more preferably under conditions that allow less than or equal to about 15% base pair mismatch, more preferably under conditions that allow less than or equal to about 10% base pair mismatch and even more preferably under conditions that allow less than or equal to about 5% base pair mismatch with a nucleic acid molecule selected from the group consisting of a nucleic acid sequence complementary to a nucleic acid sequence of Table I, Table II, Table III and/or Table IV.

[0096] Another embodiment of the present invention includes a flea ALN protein encoded by a nucleic acid molecule that hybridizes under conditions comprising, (a) hybridizing in a solution comprising 1×SSC and 0% formamide, at a temperature of about 37° C. and (b) washing in a solution comprising 1×SSC and 0% formamide, at a temperature of about 47.5° C., to an isolated nucleic acid molecule selected from the group consisting of SEQ ID NO:3 and SEQ ID NO:6.

[0097] Another embodiment of the present invention includes a flea CBP protein encoded by a nucleic acid molecule that hybridizes under conditions comprising, (a) hybridizing in a solution comprising 1×SSC and 0% formamide, at a temperature of about 37° C. and (b) washing in a solution comprising 1×SSC and 0% formamide, at a temperature of about 47.5° C., to an isolated nucleic acid molecule selected from the group consisting of SEQ ID NO:9 and SEQ ID NO:13.

[0098] Another embodiment of the present invention includes a flea NKAB protein encoded by a nucleic acid molecule that hybridizes under conditions comprising, (a) hybridizing in a solution comprising 1×SSC and 0% formamide, at a temperature of about 37° C. and (b) washing in a solution comprising 1×SSC and 0% formamide, at a temperature of about 47.5° C., to an isolated nucleic acid molecule selected from the group consisting of SEQ ID NO:15 and SEQ ID NO:18.

[0099] Another embodiment of the present invention includes a flea LGIC protein encoded by a nucleic acid molecule that hybridizes under conditions comprising, (a) hybridizing in a solution comprising 1×SSC and 0% formamide, at a temperature of about 37° C. and (b) washing in a solution comprising 1×SSC and 0% formamide, at a temperature of about 47.5° C., to an isolated nucleic acid molecule selected from the group consisting of SEQ ID NO:21, SEQ ID NO:24, SEQ ID NO:1860, SEQ ID NO:1863, and SEQ ID NO:1866.

[0100] Another embodiment of the present invention includes a flea ANON protein encoded by a nucleic acid molecule that hybridizes under conditions comprising, (a) hybridizing in a solution comprising 1×SSC and 0% formamide, at a temperature of about 37° C. and (b) washing in a solution comprising 1×SSC and 0% formamide, at a temperature of about 47.5° C., to an isolated nucleic acid molecule selected from the group consisting of SEQ ID NO:27 and SEQ ID NO:30.

[0101] Another embodiment of the present invention includes a flea MALV protein encoded by a nucleic acid molecule that hybridizes under conditions comprising, (a) hybridizing in a solution comprising 1×SSC and 0% formamide, at a temperature of about 37° C. and (b) washing in a solution comprising 1×SSC and 0% formamide, at a temperature of about 47.5° C., to an isolated nucleic acid molecule selected from the group consisting of SEQ ID NO:33 and SEQ ID NO:36.

[0102] Another embodiment of the present invention includes a flea OS-D protein encoded by a nucleic acid molecule that hybridizes under conditions comprising, (a) hybridizing in a solution comprising 1×SSC and 0% formamide, at a temperature of about 37° C. and (b) washing in a solution comprising 1×SSC and 0% formamide, at a temperature of about 47.5° C., to an isolated nucleic acid molecule selected from the group consisting of SEQ ID NO:39 and SEQ ID NO:42.

[0103] Another embodiment of the present invention includes a flea NMDA protein encoded by a nucleic acid molecule that hybridizes under conditions comprising, (a) hybridizing in a solution comprising 1×SSC and 0% formamide, at a temperature of about 37° C. and (b) washing in a solution comprising 1×SSC and 0% formamide, at a temperature of about 47.5° C., to an isolated nucleic acid molecule selected from the group consisting of SEQ ID NO:45 and SEQ ID NO:48.

[0104] Another embodiment of the present invention includes a flea CLBP protein encoded by a nucleic acid molecule that hybridizes under conditions comprising, (a) hybridizing in a solution comprising 1×SSC and 0% formamide, at a temperature of about 37° C. and (b) washing in a solution comprising 1×SSC and 0% formamide, at a temperature of about 47.5° C., to an isolated nucleic acid molecule selected from the group consisting of SEQ ID NO:155, SEQ ID NO:158, SEQ ID NO:161, SEQ ID NO:164, SEQ ID NO:167 and SEQ ID NO:170.

[0105] Another embodiment of the present invention includes a flea NAH protein encoded by a nucleic acid molecule that hybridizes under conditions comprising, (a) hybridizing in a solution comprising 1×SSC and 0% formamide, at a temperature of about 37° C. and (b) washing in a solution comprising 1×SSC and 0% formamide, at a temperature of about 47.5° C., to an isolated nucleic acid molecule selected from the group consisting of SEQ ID NO:1869 and SEQ ID NO:1871.

[0106] Another embodiment of the present invention includes a flea CLIC protein encoded by a nucleic acid molecule that hybridizes under conditions comprising, (a) hybridizing in a solution comprising 1×SSC and 0% formamide, at a temperature of about 37° C. and (b) washing in a solution comprising 1×SSC and 0% formamide, at a temperature of about 47.5° C., to an isolated nucleic acid molecule selected from the group consisting of SEQ ID NO:1874 and SEQ ID NO:1876.

[0107] Another embodiment of the present invention includes a flea PL2 protein encoded by a nucleic acid molecule that hybridizes under conditions comprising, (a) hybridizing in a solution comprising 1×SSC and 0% formamide, at a temperature of about 37° C. and (b) washing in a solution comprising 1×SSC and 0% formamide, at a temperature of about 47.5° C., to an isolated nucleic acid molecule selected from the group consisting of SEQ ID NO:1879, SEQ ID NO:1881, SEQ ID NO:1884 and SEQ ID NO:1886.

[0108] Another embodiment of the present invention includes a flea PL3 protein encoded by a nucleic acid molecule that hybridizes under conditions comprising, (a) hybridizing in a solution comprising 1×SSC and 0% formamide, at a temperature of about 37° C. and (b) washing in a solution comprising 1×SSC and 0% formamide, at a temperature of about 47.5° C., to an isolated nucleic acid molecule selected from the group consisting of SEQ ID NO:1889 and SEQ ID NO:1891.

[0109] Another embodiment of the present invention includes a flea PL4 protein encoded by a nucleic acid molecule that hybridizes under conditions comprising, (a) hybridizing in a solution comprising 1×SSC and 0% formamide, at a temperature of about 37° C. and (b) washing in a solution comprising 1×SSC and 0% formamide, at a temperature of about 47.5° C., to an isolated nucleic acid molecule selected from the group consisting of SEQ ID NO:1893, SEQ ID NO:1895, SEQ ID NO:1898, and SEQ ID NO:1900.

[0110] Another embodiment of the present invention includes a flea SVP protein encoded by a nucleic acid molecule that hybridizes under conditions comprising, (a) hybridizing in a solution comprising 1×SSC and 0% formamide, at a temperature of about 37° C. and (b) washing in a solution comprising 1×SSC and 0% formamide, at a temperature of about 47.5° C., to an isolated nucleic acid molecule selected from the group consisting of SEQ ID NO:1903 and SEQ ID NO:1905.

[0111] Another embodiment of the present invention includes a flea VGCC protein encoded by a nucleic acid molecule that hybridizes under conditions comprising, (a) hybridizing in a solution comprising 1×SSC and 0% formamide, at a temperature of about 37° C. and (b) washing in a solution comprising 1×SSC and 0% formamide, at a temperature of about 47.5° C., to an isolated nucleic acid molecule selected from the group consisting of SEQ ID NO:1907, SEQ ID NO:1909, SEQ ID NO:1911, SEQ ID NO:1913, SEQ ID NO:1916, and SEQ ID NO:1918.

[0112] Another embodiment of the present invention includes a flea AUP protein encoded by a nucleic acid molecule that hybridizes under conditions comprising, (a) hybridizing in a solution comprising 1×SSC and 0% formamide, at a temperature of about 37° C. and (b) washing in a solution comprising 1×SSC and 0% formamide, at a temperature of about 47.5° C., to an isolated nucleic acid molecule selected from the group consisting of SEQ ID NO:1921 and SEQ ID NO:1923.

[0113] Another embodiment of the present invention includes a flea 7B2 protein encoded by a nucleic acid molecule that hybridizes under conditions comprising, (a) hybridizing in a solution comprising 1×SSC and 0% formamide, at a temperature of about 37° C. and (b) washing in a solution comprising 1×SSC and 0% formamide, at a temperature of about 47.5° C., to an isolated nucleic acid molecule selected from the group consisting of SEQ ID NO:1926, SEQ ID NO:1928, and SEQ ID NO:1931.

[0114] Another embodiment of the present invention includes a flea HMT and/or HNC protein encoded by a nucleic acid molecule that hybridizes under conditions comprising, (a) hybridizing in a solution comprising 1×SSC and 0% formamide, at a temperature of about 37° C. and (b) washing in a solution comprising 1×SSC and 0% formamide, at a temperature of about 47.5° C., to an isolated nucleic acid molecule selected from the group consisting of a nucleic acid sequence complementary to a nucleic acid sequence of Table I, Table II, Table III and/or Table IV.

[0115] Another preferred flea ALN protein of the present invention includes a protein that is encoded by a nucleic acid molecule that is preferably at least about 70% identical, more preferably at least about 75% identical, more preferably at least about 80% identical, more preferably about at least 85% identical, more preferably about at least 90% identical, and even more preferably about at least 95% identical to a nucleic acid molecule having the nucleic acid sequence SEQ ID NO:1 and/or SEQ ID NO:4; also preferred are fragments (i.e. portions) of such proteins encoded by nucleic acid molecules that are at least about 18 nucleotides. Percent identity as used herein is determined using the Compare function by maximum matching within the program DNASIS® Version 2.1 using default parameters.

[0116] Another preferred flea CBP protein of the present invention includes a protein that is encoded by a nucleic acid molecule that is preferably at least about 70% identical, more preferably at least about 75% identical, more preferably at least about 80% identical, more preferably at least about 85% identical, more preferably at least about 90% identical, and even more preferably at least about 95% identical to a nucleic acid molecule having the nucleic acid sequence SEQ ID NO:7 and/or SEQ ID NO:10; also preferred are fragments (i.e. portions) of such proteins encoded by nucleic acid molecules that are at least about 18 nucleotides. Percent identity as used herein is determined using the Compare function by maximum matching within the program DNASIS® Version 2.1 using default parameters.

[0117] Another preferred flea NKAB protein of the present invention includes a protein that is encoded by a nucleic acid molecule that is preferably at least about 70% identical, more preferably at least about 75% identical, more preferably at least about 80% identical, more preferably at least about 85% identical, more preferably at least about 90% identical, and even more preferably at least about 95% identical to a nucleic acid molecule having the nucleic acid sequence SEQ ID NO:13 and/or SEQ ID NO:16; also preferred are fragments (i.e. portions) of such proteins encoded by nucleic acid molecules that are at least about 18 nucleotides. Percent identity as used herein is determined using the Compare function by maximum matching within the program DNASIS® Version 2.1 using default parameters.

[0118] Another preferred flea LGIC protein of the present invention includes a protein that is encoded by a nucleic acid molecule that is preferably at least about 70% identical, more preferably at least about 75% identical, more preferably at least about 80% identical, more preferably at least about 85% identical, more preferably at least about 90% identical, and even more preferably at least about 95% identical to a nucleic acid molecule having the nucleic acid sequence SEQ ID NO:19, SEQ ID NO:22, SEQ ID NO:1861, and/or SEQ ID NO:1864; also preferred are fragments (i.e. portions) of such proteins encoded by nucleic acid molecules that are at least about 18 nucleotides. Percent identity as used herein is determined using the Compare function by maximum matching within the program DNASIS® Version 2.1 using default parameters.

[0119] Another preferred flea ANON protein of the present invention includes a protein that is encoded by a nucleic acid molecule that is preferably at least about 70% identical, more preferably at least about 75% identical, more preferably at least about 80% identical, more preferably at least about 85% identical, more preferably at least about 90% identical, and even more preferably at least about 95% identical to a nucleic acid molecule having the nucleic acid sequence SEQ ID NO:25 and/or SEQ ID NO:28; also preferred are fragments (i.e. portions) of such proteins encoded by nucleic acid molecules that are at least about 18 nucleotides. Percent identity as used herein is determined using the Compare function by maximum matching within the program DNASIS® Version 2.1 using default parameters.

[0120] Another preferred flea MALV protein of the present invention includes a protein that is encoded by a nucleic acid molecule that is preferably at least about 70% identical, more preferably at least about 75% identical, more preferably at least about 80% identical, more preferably at least about 85% identical, more preferably at least about 90% identical, and even more preferably at least about 95% identical to a nucleic acid molecule having the nucleic acid sequence SEQ ID NO:31 and/or SEQ ID NO:34; also preferred are fragments (i.e. portions) of such proteins encoded by nucleic acid molecules that are at least about 18 nucleotides. Percent identity as used herein is determined using the Compare function by maximum matching within the program DNASIS® Version 2.1 using default parameters:

[0121] Another preferred flea OS-D protein of the present invention includes a protein that is encoded by a nucleic acid molecule that is preferably at least about 70% identical, more preferably at least about 75% identical, more preferably at least about 80% identical, more preferably at least about 85% identical, more preferably at least about 90% identical, and even more preferably at least about 95% identical to a nucleic acid molecule having the nucleic acid sequence SEQ ID NO:37 and/or SEQ ID NO:40; also preferred are fragments (i.e. portions) of such proteins encoded by nucleic acid molecules that are at least about 18 nucleotides. Percent identity as used herein is determined using the Compare function by maximum matching within the program DNASIS® Version 2.1 using default parameters.

[0122] Another preferred flea NMDA protein of the present invention includes a protein that is encoded by a nucleic acid molecule that is preferably at least about 70% identical, more preferably at least about 75% identical, more preferably at least about 80% identical, more preferably at least about 85% identical, more preferably at least about 90% identical, and even more preferably at least about 95% identical to a nucleic acid molecule having the nucleic acid sequence SEQ ID NO:43 and/or SEQ ID NO:46; also preferred are fragments (i.e. portions) of such proteins encoded by nucleic acid molecules that are at least about 18 nucleotides. Percent identity as used herein is determined using the Compare function by maximum matching within the program DNASIS® Version 2.1 using default parameters.

[0123] Another preferred flea CLBP protein of the present invention includes a protein that is encoded by a nucleic acid molecule that is preferably at least about 70% identical, more preferably at least about 75% identical, more preferably at least about 80% identical, more preferably at least about 85% identical, more preferably at least about 90% identical, and even more preferably at least about 95% identical to a nucleic acid molecule having the nucleic acid sequence SEQ ID NO:153, SEQ ID NO:156, SEQ ID NO:159, SEQ ID NO:162, SEQ ID NO:165 and/or SEQ ID NO:168; also preferred are fragments (i.e. portions) of such proteins encoded by nucleic acid molecules that are at least about 18 nucleotides. Percent identity as used herein is determined using the Compare function by maximum matching within the program DNASIS® Version 2.1 using default parameters.

[0124] Another preferred flea NAH protein of the present invention includes a protein that is encoded by a nucleic acid molecule that is preferably at least about 70% identical, more preferably at least about 75% identical, more preferably at least about 80% identical, more preferably about at least 85% identical, more preferably about at least 90% identical, and even more preferably about at least 95% identical to a nucleic acid molecule having the nucleic acid sequence SEQ ID NO:1867 and/or SEQ ID NO:1870; also preferred are fragments (i.e. portions) of such proteins encoded by nucleic acid molecules that are at least about 18 nucleotides. Percent identity as used herein is determined using the Compare function by maximum matching within the program DNASIS® Version 2.1 using default parameters.

[0125] Another preferred flea CLIC protein of the present invention includes a protein that is encoded by a nucleic acid molecule that is preferably at least about 70% identical, more preferably at least about 75% identical, more preferably at least about 80% identical, more preferably about at least 85% identical, more preferably about at least 90% identical, and even more preferably about at least 95% identical to a nucleic acid molecule having the nucleic acid sequence SEQ ID NO:1872 and/or SEQ ID NO:1875; also preferred are fragments (i.e. portions) of such proteins encoded by nucleic acid molecules that are at least about 18 nucleotides. Percent identity as used herein is determined using the Compare function by maximum matching within the program DNASIS® Version 2.1 using default parameters.

[0126] Another preferred flea PL2 protein of the present invention includes a protein that is encoded by a nucleic acid molecule that is preferably at least about 70% identical, more preferably at least about 75% identical, more preferably at least about 80% identical, more preferably about at least 85% identical, more preferably about at least 90% identical, and even more preferably about at least 95% identical to a nucleic acid molecule having the nucleic acid sequence SEQ ID NO:1877, SEQ ID NO:1878, SEQ ID NO:1880, SEQ ID NO:1882, and/or SEQ ID NO:1885; also preferred are fragments (i.e. portions) of such proteins encoded by nucleic acid molecules that are at least about 18 nucleotides. Percent identity as used herein is determined using the Compare function by maximum matching within the program DNASIS® Version 2.1 using default parameters.

[0127] Another preferred flea PL3 protein of the present invention includes a protein that is encoded by a nucleic acid molecule that is preferably at least about 70% identical, more preferably at least about 75% identical, more preferably at least about 80% identical, more preferably about at least 85% identical, more preferably about at least 90% identical, and even more preferably about at least 95% identical to a nucleic acid molecule having the nucleic acid sequence SEQ ID NO:1887 and/or SEQ ID NO:1890; also preferred are fragments (i.e. portions) of such proteins encoded by nucleic acid molecules that are at least about 18 nucleotides. Percent identity as used herein is determined using the Compare function by maximum matching within the program DNASIS® Version 2.1 using default parameters.

[0128] Another preferred flea PL4 protein of the present invention includes a protein that is encoded by a nucleic acid molecule that is preferably at least about 70% identical, more preferably at least about 75% identical, more preferably at least about 80% identical, more preferably about at least 85% identical, more preferably about at least 90% identical, and even more preferably about at least 95% identical to a nucleic acid molecule having the nucleic acid sequence SEQ ID NO:1892, SEQ ID NO:1894, SEQ ID NO:1896 and/or SEQ ID NO:1899; also preferred are fragments (i.e. portions) of such proteins encoded by nucleic acid molecules that are at least about 18 nucleotides. Percent identity as used herein is determined using the Compare function by maximum matching within the program DNASIS® Version 2.1 using default parameters.

[0129] Another preferred flea SVP protein of the present invention includes a protein that is encoded by a nucleic acid molecule that is preferably at least about 70% identical, more preferably at least about 75% identical, more preferably at least about 80% identical, more preferably about at least 85% identical, more preferably about at least 90% identical, and even more preferably about at least 95% identical to a nucleic acid molecule having the nucleic acid sequence SEQ ID NO:1901 and/or SEQ ID NO:1904; also preferred are fragments (i.e. portions) of such proteins encoded by nucleic acid molecules that are at least about 18 nucleotides. Percent identity as used herein is determined using the Compare function by maximum matching within the program DNASIS® Version 2.1 using default parameters.

[0130] Another preferred flea VGCC protein of the present invention includes a protein that is encoded by a nucleic acid molecule that is preferably at least about 70% identical, more preferably at least about 75% identical, more preferably at least about 80% identical, more preferably about at least 85% identical, more preferably about at least 90% identical, and even more preferably about at least 95% identical to a nucleic acid molecule having the nucleic acid sequence SEQ ID NO:1906, SEQ ID NO:1908, SEQ ID NO:1910, SEQ ID NO:1912, SEQ ID NO:1914 and/or SEQ ID NO:1917; also preferred are fragments (i.e. portions) of such proteins encoded by nucleic acid molecules that are at least about 18 nucleotides. Percent identity as used herein is determined using the Compare function by maximum matching within the program DNASIS® Version 2.1 using default parameters.

[0131] Another preferred flea AUP protein of the present invention includes a protein that is encoded by a nucleic acid molecule that is preferably at least about 70% identical, more preferably at least about 75% identical, more preferably at least about 80% identical, more preferably about at least 85% identical, more preferably about at least 90% identical, and even more preferably about at least 95% identical to a nucleic acid molecule having the nucleic acid sequence SEQ ID NO:1919 and/or SEQ ID NO:1922; also preferred are fragments (i.e. portions) of such proteins encoded by nucleic acid molecules that are at least about 18 nucleotides. Percent identity as used herein is determined using the Compare function by maximum matching within the program DNASIS® Version 2.1 using default parameters.

[0132] Another preferred flea 7B2 protein of the present invention includes a protein that is encoded by a nucleic acid molecule that is preferably at least about 70% identical, more preferably at least about 75% identical, more preferably at least about 80% identical, more preferably about at least 85% identical, more preferably about at least 90% identical, and even more preferably about at least 95% identical to a nucleic acid molecule having the nucleic acid sequence SEQ ID NO:1924, SEQ ID NO:1927 and/or SEQ ID NO:1929; also preferred are fragments (i.e. portions) of such proteins encoded by nucleic acid molecules that are at least about 18 nucleotides. Percent identity as used herein is determined using the Compare function by maximum matching within the program DNASIS® Version 2.1 using default parameters.

[0133] Another preferred flea HMT and/or HNC protein of the present invention includes a protein that is encoded by a nucleic acid molecule that is preferably at least about 70% identical, more preferably at least about 75% identical, more preferably at least about 80% identical, more preferably at least about 85% identical, more preferably at least about 90% identical, and even more preferably at least about 95% identical to a nucleic acid molecule having a nucleic acid sequence of Table I, Table II, Table III and/or Table IV; also preferred are fragments (i.e. portions) of such proteins encoded by nucleic acid molecules that are at least about 18 nucleotides. Percent identity as used herein is determined using the Compare function by maximum matching within the program DNASIS® Version 2.1 using default parameters.

[0134] Additional preferred flea ALN proteins of the present invention include proteins having the amino acid sequence SEQ ID NO:2 or SEQ ID NO:5, and proteins comprising homologues of a protein having the amino acid sequence SEQ ID NO:2 or SEQ ID NO:5, wherein such a homologue comprises at least one epitope that elicits an immune response against a protein having an amino acid sequence SEQ ID NO:2 or SEQ ID NO:5. Likewise, also preferred are proteins encoded by nucleic acid molecules comprising nucleic acid sequence SEQ ID NO:1 and/or SEQ ID NO:4, or by homologues thereof.

[0135] Additional preferred flea CBP proteins of the present invention include proteins having the amino acid sequence SEQ ID NO:8 or SEQ ID NO:11, and proteins comprising homologues of a protein having the amino acid sequence SEQ ID NO:8 or SEQ ID NO:11, wherein such a homologue comprises at least one epitope that elicits an immune response against a protein having an amino acid sequence SEQ ID NO:8 or SEQ ID NO:11. Likewise, also preferred are proteins encoded by nucleic acid molecules comprising nucleic acid sequence SEQ ID NO:7 and/or SEQ ID NO:10, or by homologues thereof.

[0136] Additional preferred flea NKAB proteins of the present invention include proteins having the amino acid sequence SEQ ID NO:14 or SEQ ID NO:17, and proteins comprising homologues of a protein having the amino acid sequence SEQ ID NO:14 or SEQ ID NO:17, wherein such a homologue comprises at least one epitope that elicits an immune response against a protein having an amino acid sequence SEQ ID NO:14 or SEQ ID NO:17. Likewise, also preferred are proteins encoded by nucleic acid molecules comprising nucleic acid sequence SEQ ID NO:13 and/or SEQ ID NO:16, or by homologues thereof.

[0137] Additional preferred flea LGIC proteins of the present invention include proteins having the amino acid sequence SEQ ID NO:20, SEQ ID NO:23 or SEQ ID NO:1862, and proteins comprising homologues of a protein having the amino acid sequence SEQ ID NO:20, SEQ ID NO:23 or SEQ ID NO:1862, wherein such a homologue comprises at least one epitope that elicits an immune response against a protein having an amino acid sequence SEQ ID NO:20, SEQ ID NO:23 or SEQ ID NO:1862. Likewise, also preferred are proteins encoded by nucleic acid molecules comprising nucleic acid sequence SEQ ID NO:19, SEQ ID NO:22, SEQ ID NO:1859, SEQ ID NO:1861 and/or SEQ ID NO:1864 or by homologues thereof.

[0138] Additional preferred flea ANON proteins of the present invention include proteins having the amino acid sequence SEQ ID NO:26 or SEQ ID NO:29, and proteins comprising homologues of a protein having the amino acid sequence SEQ ID NO:26 or SEQ ID NO:29, wherein such a homologue comprises at least one epitope that elicits an immune response against a protein having an amino acid sequence SEQ ID NO:26 or SEQ ID NO:29. Likewise, also preferred are proteins encoded by nucleic acid molecules comprising nucleic acid sequence SEQ ID NO:25 and/or SEQ ID NO:28, or by homologues thereof.

[0139] Additional preferred flea MALV proteins of the present invention include proteins having the amino acid sequence SEQ ID NO:32 or SEQ ID NO:35, and proteins comprising homologues of a protein having the amino acid sequence SEQ ID NO:32 or SEQ ID NO:35, wherein such a homologue comprises at least one epitope that elicits an immune response against a protein having an amino acid sequence SEQ ID NO:32 or SEQ ID NO:35. Likewise, also preferred are proteins encoded by nucleic acid molecules comprising nucleic acid sequence SEQ ID NO:31 and/or SEQ ID NO:34, or by homologues thereof.

[0140] Additional preferred flea OS-D proteins of the present invention include proteins having the amino acid sequence SEQ ID NO:38 or SEQ ID NO:41, and proteins comprising homologues of a protein having the amino acid sequence SEQ ID NO:38 or SEQ ID NO:41, wherein such a homologue comprises at least one epitope that elicits an immune response against a protein having an amino acid sequence SEQ ID NO:38 or SEQ ID NO:41. Likewise, also preferred are proteins encoded by nucleic acid molecules comprising nucleic acid sequence SEQ ID NO:37 and/or SEQ ID NO:40, or by homologues thereof.

[0141] Additional preferred flea NMDA proteins of the present invention include proteins having the amino acid sequence SEQ ID NO:44 or SEQ ID NO:47, and proteins comprising homologues of a protein having the amino acid sequence SEQ ID NO:44 or SEQ ID NO:47, wherein such a homologue comprises at least one epitope that elicits an immune response against a protein having an amino acid sequence SEQ ID NO:44 or SEQ ID NO:47. Likewise, also preferred are proteins encoded by nucleic acid molecules comprising nucleic acid sequence SEQ ID NO:43 and/or SEQ ID NO:46, or by homologues thereof.

[0142] Additional preferred flea CLBP proteins of the present invention include proteins having the amino acid sequence SEQ ID NO:154, SEQ ID NO:157, SEQ ID NO:160, SEQ ID NO:163, SEQ ID NO:166 or SEQ ID NO:169, and proteins comprising homologues of a protein having the amino acid sequence SEQ ID NO:154, SEQ ID NO:157, SEQ ID NO:160, SEQ ID NO:163, SEQ ID NO:166 or SEQ ID NO:169, wherein such a homologue comprises at least one epitope that elicits an immune response against a protein having an amino acid sequence SEQ ID NO:154, SEQ ID NO:157, SEQ ID NO:160, SEQ ID NO:163, SEQ ID NO:166 or SEQ ID NO:169. Likewise, also preferred are proteins encoded by nucleic acid molecules comprising nucleic acid sequence SEQ ID NO:153, SEQ ID NO:156, SEQ ID NO:159, SEQ ID NO:162, SEQ ID NO:165 and/or SEQ ID NO:168, or by homologues thereof.

[0143] Additional preferred flea NAH proteins of the present invention include proteins having the amino acid sequence SEQ ID NO:1868, and proteins comprising homologues of a protein having the amino acid sequence SEQ ID NO:1868, wherein such a homologue comprises at least one epitope that elicits an immune response against a protein having an amino acid sequence SEQ ID NO:1868. Likewise, also preferred are proteins encoded by nucleic acid molecules comprising nucleic acid sequence SEQ ID NO:1867 and/or SEQ ID NO:1870, or by homologues thereof.

[0144] Additional preferred flea CLIC proteins of the present invention include proteins having the amino acid sequence SEQ ID NO:1873, and proteins comprising homologues of a protein having the amino acid sequence SEQ ID NO:1873, wherein such a homologue comprises at least one epitope that elicits an immune response against a protein having an amino acid sequence SEQ ID NO:1873. Likewise, also preferred are proteins encoded by nucleic acid molecules comprising nucleic acid sequence SEQ ID NO:1872 and/or SEQ ID NO:1875, or by homologues thereof.

[0145] Additional preferred flea PL2 proteins of the present invention include proteins having the amino acid sequence SEQ ID NO:1883, and proteins comprising homologues of a protein having the amino acid sequence SEQ ID NO:1883, wherein such a homologue comprises at least one epitope that elicits an immune response against a protein having an amino acid sequence SEQ ID NO:1883. Likewise, also preferred are proteins encoded by nucleic acid molecules comprising nucleic acid sequence SEQ ID NO:1877, SEQ ID NO:1878, SEQ ID NO:1880, SEQ ID NO:1882 and/or SEQ ID NO:1885, or by homologues thereof.

[0146] Additional preferred flea PL3 proteins of the present invention include proteins having the amino acid sequence SEQ ID NO:1888, and proteins comprising homologues of a protein having the amino acid sequence SEQ ID NO:1888, wherein such a homologue comprises at least one epitope that elicits an immune response against a protein having an amino acid sequence SEQ ID NO:1888. Likewise, also preferred are proteins encoded by nucleic acid molecules comprising nucleic acid sequence SEQ ID NO:1887 and/or SEQ ID NO:1890, or by homologues thereof.

[0147] Additional preferred flea PL4 proteins of the present invention include proteins having the amino acid sequence SEQ ID NO:1897, and proteins comprising homologues of a protein having the amino acid sequence SEQ ID NO:1897, wherein such a homologue comprises at least one epitope that elicits an immune response against a protein having an amino acid sequence SEQ ID NO:1897. Likewise, also preferred are proteins encoded by nucleic acid molecules comprising nucleic acid sequence SEQ ID NO:1892, SEQ ID NO:1894, SEQ ID NO:1896 and/or SEQ ID NO:1899, or by homologues thereof.

[0148] Additional preferred flea SVP proteins of the present invention include proteins having the amino acid sequence SEQ ID NO:1902, and proteins comprising homologues of a protein having the amino acid sequence SEQ ID NO:1902, wherein such a homologue comprises at least one epitope that elicits an immune response against a protein having an amino acid sequence SEQ ID NO:1902. Likewise, also preferred are proteins encoded by nucleic acid molecules comprising nucleic acid sequence SEQ ID NO:1901 and/or SEQ ID NO:1904, or by homologues thereof.

[0149] Additional preferred flea VGCC proteins of the present invention include proteins having the amino acid sequence SEQ ID NO:1915, and proteins comprising homologues of a protein having the amino acid sequence SEQ ID NO:1915, wherein such a homologue comprises at least one epitope that elicits an immune response against a protein having an amino acid sequence SEQ ID NO:1915. Likewise, also preferred are proteins encoded by nucleic acid molecules comprising nucleic acid sequence SEQ ID NO:1906, SEQ ID NO:1908, SEQ ID NO:1910, SEQ ID NO:1912, SEQ ID NO:1914 and/or SEQ ID NO:1917, or by homologues thereof.

[0150] Additional preferred flea AUP proteins of the present invention include proteins having the amino acid sequence SEQ ID NO:1920, and proteins comprising homologues of a protein having the amino acid sequence SEQ ID NO:1920, wherein such a homologue comprises at least one epitope that elicits an immune response against a protein having an amino acid sequence SEQ ID NO:1920. Likewise, also preferred are proteins encoded by nucleic acid molecules comprising nucleic acid sequence SEQ ID NO:1919 and/or SEQ ID NO:1922, or by homologues thereof.

[0151] Additional preferred flea 7B2 proteins of the present invention include proteins having the amino acid sequence SEQ ID NO:1925 or SEQ ID NO:1930, and proteins comprising homologues of a protein having the amino acid sequence SEQ ID NO:1925 or SEQ ID NO:1930, wherein such a homologue comprises at least one epitope that elicits an immune response against a protein having an amino acid sequence SEQ ID NO:1925 or SEQ ID NO:1930. Likewise, also preferred are proteins encoded by nucleic acid molecules comprising nucleic acid sequence SEQ ID NO:1924, SEQ ID NO:1927 and/or SEQ ID NO:1929, or by homologues thereof.

[0152] Additional preferred flea HMT and/or HNC proteins of the present invention include proteins having an amino acid sequence encoded by a nucleic acid sequence of Table I, Table II, Table III and/or Table IV, and proteins comprising homologues of a protein encoded by a nucleic acid sequence of Table I, Table II, Table III and/or Table IV, wherein such a homologue comprises at least one epitope that elicits an immune response against a protein encoded by a nucleic acid sequence of Table I, Table II, Table III and/or Table IV.

[0153] A preferred isolated protein of the present invention is a protein encoded by at least one of the following nucleic acid molecules: nCfALN₂₀₅₇, nCfALN₁₁₅₂, nCfCBP₁₁₂₈, nCfCBP₈₁₆, nCfNKAB₁₇₁₄, nCfNKAB₉₇₈, nCfLGIC₂₂₄₀, nCfLGIC₁₇₀₇, nCfANON₁₄₂₉, nCfANON₁₁₉₄, nCfMALV₇₆₅, nCfMALV₇₆₂, nCfOSD₆₀₄, nCfOSD₄₀₅, nCfNMDA₁₂₂₇, nCfNMDA₇₃₈, nCfCLBP1A₆₃₃, nCfCLBP1A₄₄₁, nCfCLBP2A₆₃₁, nCfCLBP2A₄₄₁, nCfLGIC₂₇₃₉, nCfLGIC₂₀₁₆, nCfNAH₂₀₈₀, nCfNAH₁₈₂₄, nCfCLIC₂₂₈₃, nCfCLIC₇₈₆, nCfPL2₁₂₉₁, nCfPL2₁₁₇₃, nCfPL3₄₀₆, nCfPL3₂₄₃, nCfPL4₉₇₄, nCfPL4₁₀₄₃, nCfPL4₁₀₆₂, nCfPL4₈₅₅, nCfSVP₁₈₇₅, nCfSVP₁₅₉₀, nCfVGCC₃₈₁, nCfVGCC₂₁₉₁, nCfVGCC₁₉₆₈, nCfVGCC₆₇₃, nCfVGCC₃₁₂₆, nCfVGCC₂₅₅₃, nCfAUP₁₁₈₁, nCfAUP₃₀₆, nCf7B2₂₁₆₁, nCf7B2₈₀₁, nCf7B2₇₄₁ or allelic variants of any of these nucleic acid molecules. Another preferred isolated protein is encoded by a nucleic acid molecule having nucleic acid sequence SEQ ID NO:1, SEQ ID NO:4, SEQ ID NO:7, SEQ ID NO:10, SEQ ID NO:13, SEQ ID NO:16, SEQ ID NO:19, SEQ ID NO:22, SEQ ID NO:25, SEQ ID NO:28, SEQ ID NO:31, SEQ ID NO:34, SEQ ID NO:37, SEQ ID NO:40, SEQ ID NO:43, SEQ ID NO:46, SEQ ID NO:153, SEQ ID NO:156, SEQ ID NO:159, SEQ ID NO:162, SEQ ID NO:165, SEQ ID NO:168, SEQ ID NO:1859, SEQ ID NO:1861, SEQ ID NO:1864, SEQ ID NO:1867, SEQ ID NO:1870, SEQ ID NO:1872, SEQ ID NO:1875, SEQ ID NO:1877, SEQ ID NO:1878, SEQ ID NO:1881, SEQ ID NO:1882, SEQ ID NO:1885, SEQ ID NO:1887, SEQ ID NO:1890, SEQ ID NO:1892, SEQ ID NO:1894, SEQ ID NO:1896, SEQ ID NO:1899, SEQ ID NO:1901, SEQ ID NO:1904, SEQ ID NO:1906, SEQ ID NO:1908, SEQ ID NO:1910 SEQ ID NO:1912, SEQ ID NO:1914, SEQ ID NO:1917, SEQ ID NO:1919, SEQ ID NO:1922, SEQ ID NO:1924, SEQ ID NO:1927, and/or SEQ ID NO:1929; or a protein encoded by an allelic variant of any of these listed nucleic acid molecules.

[0154] Preferred proteins of the present invention include proteins that are at least about 70%, preferably at least about 80%, more preferably at least about 85%, even more preferably at least about 90%, even more preferably at least about 95%, and even more preferably about 100% identical to PCfALN₃₈₄, PCfCBP₂₇₂, PCfNKAB₃₂₆, PCfLGIC₅₆₉, PCfANON₃₉₈, PCfMALV₂₅₄, PCfOSD₁₃₅, PCfNMDA₂₄₆, PCfCLBP1A₁₄₇ or PCfCLBP2A₁₄₇. Additionally preferred are proteins encoded by allelic variants of a nucleic acid molecules encoding proteins PCfALN₃₈₄, PCfCBP₂₇₂, PCfNKAB₃₂₆, PCfLGIC₅₆₉, PCfANON₃₉₈, PCfMALV₂₅₄, PCfOSD₁₃₅, PCfNMDA₂₄₆, PCfCLBP1A₁₄₇, PCfCLBP2A₁₄₇, PCfLGIC₆₇₂, PCfNAH₆₀₈, PCfCLIC₂₆₂, PCfPL2₃₉₁, PCfPL3₈₁, PCfPL4₂₈₅, PCfSVP₅₃₀, PCfVGCC₈₅₁, PCfAUP₁₀₂, PCf7B2₂₆₇, PCf7B2₂₄₇. Also preferred are fragments thereof having at least about 6 amino acid residues.

[0155] Other preferred HMT and HNC proteins of the present invention include proteins having amino acid sequences that are at least about 70%, preferably at least about 80%, more preferably at least about 85%, even more preferably at least about 90%, even more preferably at least about 95%, and even more preferably about 100% identical to amino acid sequence SEQ ID NO:2, SEQ ID NO:8, SEQ ID NO:14, SEQ ID NO:20, SEQ ID NO:26, SEQ ID NO:32, SEQ ID NO:38, SEQ ID NO:44, SEQ ID NO:154, SEQ ID NO:160, SEQ ID NO:163, SEQ ID NO:169, SEQ ID NO:1862, SEQ ID NO:1868, SEQ ID NO:1873, SEQ ID NO:1879, SEQ ID NO:1883, SEQ ID NO:1888, SEQ ID NO:1897, SEQ ID NO:1902, SEQ ID NO:1915, SEQ ID NO:1920, SEQ ID NO:1925, and/or SEQ ID NO:1930; and proteins encoded by allelic variants of nucleic acid molecules encoding HMT and HNC proteins having amino acid sequences SEQ ID NO:2, SEQ ID NO:8, SEQ ID NO:14, SEQ ID NO:20, SEQ ID NO:26, SEQ ID NO:32, SEQ ID NO:38, SEQ ID NO:44, SEQ ID NO:154, SEQ ID NO:160, SEQ ID NO:163, SEQ ID NO:169, SEQ ID NO:1862, SEQ ID NO:1868, SEQ ID NO:1873, SEQ ID NO:1879, SEQ ID NO:1883, SEQ ID NO:1888, SEQ ID NO:1897, SEQ ID NO:1902, SEQ ID NO:1915, SEQ ID NO:1920, SEQ ID NO:1925, and/or SEQ ID NO:1930. Also preferred are fragments thereof having at least about 6 amino acid residues.

[0156] In one embodiment of the present invention, C. felis HMT and HNC proteins comprise amino acid sequence SEQ ID NO:2, SEQ ID NO:8, SEQ ID NO:14, SEQ ID NO:20, SEQ ID NO:26, SEQ ID NO:32, SEQ ID NO:38, SEQ ID NO:44, SEQ ID NO:154, SEQ ID NO:160, SEQ ID NO:163, SEQ ID NO:169, SEQ ID NO:1862, SEQ ID NO:1868, SEQ ID NO:1873, SEQ ID NO:1879, SEQ ID NO:1883, SEQ ID NO:1888, SEQ ID NO:1897, SEQ ID NO:1902, SEQ ID NO:1915, SEQ ID NO:1920, SEQ ID NO:1925, and/or SEQ ID NO:1930 (including, but not limited to, the proteins consisting of amino acid sequence SEQ ID NO:2, SEQ ID NO:8, SEQ ID NO:14, SEQ ID NO:20, SEQ ID NO:26, SEQ ID NO:32, SEQ ID NO:38, SEQ ID NO:44, SEQ ID NO:154, SEQ ID NO:160, SEQ ID NO:163, SEQ ID NO:169, SEQ ID NO:1862, SEQ ID NO:1868, SEQ ID NO:1873, SEQ ID NO:1879, SEQ ID NO:1883, SEQ ID NO:1888, SEQ ID NO:1897, SEQ ID NO:1902, SEQ ID NO:1915, SEQ ID NO:1920, SEQ ID NO:1925, and/or SEQ ID NO:1930, fusion proteins and multivalent proteins), and proteins encoded by allelic variants of nucleic acid molecules encoding proteins having amino acid sequence SEQ ID NO:2, SEQ ID NO:8, SEQ ID NO:14, SEQ ID NO:20, SEQ ID NO:26, SEQ ID NO:32, SEQ ID NO:38, SEQ ID NO:44, SEQ ID NO:154, SEQ ID NO:160, SEQ ID NO:163, SEQ ID NO:169, SEQ ID NO:1862, SEQ ID NO:1868, SEQ ID NO:1873, SEQ ID NO:1879, SEQ ID NO:1883, SEQ ID NO:1888, SEQ ID NO:1897, SEQ ID NO:1902, SEQ ID NO:1915, SEQ ID NO:1920, SEQ ID NO:1925, and/or SEQ ID NO:1930.

[0157] In one embodiment, a preferred flea HMT or HNC protein comprises an amino acid sequence of at least about 35 amino acids, preferably at least about 50 amino acids, more preferably at least about 100 amino acids, more preferably at least about 200 amino acids, more preferably at least about 250 amino acids, more preferably at least about 300 amino acids, more preferably at least about 350 amino acids, more preferably at least about 400 amino acids, more preferably at least about 450 amino acids, more preferably at least about 500 amino acids, even more preferably at least about 550 amino acids, and even more preferably at least about 575 amino acids. In another embodiment, preferred flea HMT and HNC proteins comprise full-length proteins, i.e., proteins encoded by full-length coding regions, or post-translationally modified proteins thereof, such as mature proteins from which initiating methionine and/or signal sequences or “pro” sequences have been removed.

[0158] A fragment of an HMT and/or HNC protein of the present invention preferably comprises at least about 5 amino acids, more preferably at least about 10 amino acids, more preferably at least about 15 amino acids, more preferably at least about 20 amino acids, more preferably at least about 25 amino acids, more preferably at least about 30 amino acids, more preferably at least about 35 amino acids, more preferably at least about 40 amino acids, more preferably at least about 45 amino acids, more preferably at least about 50 amino acids, more preferably at least about 55 amino acids, more preferably at least about 60 amino acids, more preferably at least about 65 amino acids, more preferably at least about 70 amino acids, more preferably at least about 75 amino acids, more preferably at least about 80 amino acids, more preferably at least about 85 amino acids, more preferably at least about 90 amino acids, more preferably at least about 95 amino acids, and even more preferably at least about 100 amino acids in length.

[0159] Additional preferred HMT and HNC proteins of the present invention include proteins encoded by nucleic acid molecules comprising at least a portion of nCfALN₂₀₅₇, nCfALN₁₁₅₂, nCfCBP₁₁₂₈, nCfCBP₈₁₆, nCfNKAB₉₇₈, nCfNKAB₉₇₈, nCfLGIC₂₂₄₀, nCfLGIC₁₇₀₇, nCfANON₁₄₂₉, nCfANON₁₁₉₄, nCfMALV₇₆₅, nCfMALV₇₆₂, nCfOSD₆₀₄, nCfOSD₄₀₅, nCfNMDA₁₂₂₇, nCfNMDA₇₃₈, nCfCLBP1A₆₃₃, nCfCLBP1A₄₄₁, nCfCLBP2A₆₃₁, nCfCLBP2A₄₄₁, nCfLGIC₂₇₃₉, nCfLGIC₂₀₁₆, nCfNAH₂₀₈₀, nCfNAH₁₈₂₄, nCfCLIC₂₂₈₃, nCfCLIC₇₈₆, nCfPL2₁₂₉₁, nCfPL2₁₁₇₃, nCfPL3₄₀₆, nCfPL3₂₄₃, nCfPL4₉₇₄, nCfPL4₁₀₄₃, nCfPL4₁₀₆₂, nCfPL4₈₅₅, nCfSVP₁₈₇₅, nCfSVP₁₅₉₀, nCfVGCC₃₈₁, nCfVGCC₂₁₉₁, nCfVGCC₁₉₆₈, nCfVGCC₆₇₃, nCfVGCC₃₁₂₆, nCfVGCC₂₅₅₃, nCfAUP₁₁₈₁, nCfAUP₃₀₆, nCf7B2₂₁₆₁, nCf7B2₈₀₁, nCf7B2₇₄₁ as well as HMT and HNC proteins encoded by allelic variants of such nucleic acid molecules. A portion of such HMT and HNC nucleic acid molecule is preferably at least 18 nucleotides in length.

[0160] Also preferred are HMT and HNC proteins encoded by nucleic acid molecules having nucleic acid sequences comprising at least a portion of SEQ ID NO:1, SEQ ID NO:4, SEQ ID NO:7, SEQ ID NO:10, SEQ ID NO:13, SEQ ID NO:16, SEQ ID NO:19, SEQ ID NO:22, SEQ ID NO:25, SEQ ID NO:28, SEQ ID NO:31, SEQ ID NO:34, SEQ ID NO:37, SEQ ID NO:40, SEQ ID NO:43, SEQ ID NO:46, SEQ ID NO:153, SEQ ID NO:156, SEQ ID NO:159, SEQ ID NO:162, SEQ ID NO:165, SEQ ID NO:168, SEQ ID NO:1859, SEQ ID NO:1861, SEQ ID NO:1864, SEQ ID NO:1867, SEQ ID NO:1870, SEQ ID NO:1872, SEQ ID NO:1875, SEQ ID NO:1877, SEQ ID NO:1878, SEQ ID NO:1881, SEQ ID NO:1882, SEQ ID NO:1885, SEQ-ID NO:1887, SEQ ID NO:1890, SEQ ID NO:1892, SEQ ID NO:1894, SEQ ID NO:1896, SEQ ID NO:1899, SEQ ID NO:1901, SEQ ID NO:1904, SEQ ID NO:1906, SEQ ID NO:1908, SEQ ID NO:1910, SEQ ID NO:1912, SEQ ID NO:1914, SEQ ID NO:1917, SEQ ID NO:1919, SEQ ID NO:1922, SEQ ID NO:1924, SEQ ID NO:1927, and/or SEQ ID NO:1929, as well as allelic variants of these nucleic acid molecules. A portion of such HMT and HNC nucleic acid molecule is preferably at least 18 nucleotides in length.

[0161] In another embodiment, a preferred flea HMT and/or HNC protein of the present invention is encoded by a nucleic acid molecule comprising at least about 15 nucleotides, more preferably at least about 18 nucleotides, more preferably at least about 20 nucleotides, more preferably at least about 25 nucleotides, more preferably at least about 30 nucleotides, more preferably at least about 40 nucleotides, more preferably at least about 50 nucleotides, more preferably at least about 100 nucleotides, more preferably at least about 150 nucleotides, more preferably at least about 350 nucleotides, more preferably at least about 450 nucleotides, more preferably at least about 550 nucleotides, more preferably at least about 650 nucleotides, more preferably at least about 750 nucleotides, more preferably at least about 1000 nucleotides, more preferably at least about 1500 nucleotides, more preferably at least about 1750 nucleotides more preferably at least about 2000 nucleotides, and even more preferably at least about 2250 nucleotides in length. Within this embodiment is a HMT protein encoded by at least a portion of nCfALN₂₀₅₇, nCfALN₁₁₅₂, nCfCBP₁₁₂₈, nCfCBP₈₁₆, nCfNKAB₁₇₁₄, nCfNKAB₉₇₈ nCfLGIC₂₂₄₀, nCfLGIC₁₇₀₇, nCfANON₁₄₂₉, nCfANON₁₁₉₄, nCfMALV₇₆₅, nCfMALV₇₆₂, nCfOSD₆₀₄, nCfOSD₄₀₅, nCfNMDA₁₂₂₇, nCfNMDA₇₃₈, nCfCLBP1A₆₃₃, nCfCLBP1A₄₄₁, nCfCLBP2A₆₃₁, nCfCLBP2A₄₄₁, nCfLGIC₂₇₃₉, nCfLGIC₂₀₁₆, nCfNAH₂₀₈₀, nCfNAH₁₈₂₄, nCfCLIC₂₂₈₃, nCfCLIC₇₈₆, nCfPL2₁₂₉₁, nCfPL2₁₁₇₃, nCfPL3₄₀₆, nCfPL3₂₄₃, nCfPL4₉₇₄, nCfPL4₁₀₄₃, nCfPL4₁₀₆₂, nCfPL4₈₅₅, nCfSVP₁₈₇₅, nCfSVP₁₅₉₀, nCfVGCC₃₈₁, nCfVGCC₂₁₉₁, nCfVGCC₁₉₆₈, nCfVGCC₆₇₃, nCfVGCC₃₁₂₆, nCfVGCC₂₅₅₃, nCfAUP₁₁₈₁, nCfAUP₃₀₆, nCf7B2₂₁₆₁, nCf7B2₈₀₁, nCf7B2₇₄₁ or by an allelic variant of any of these nucleic acid molecules. In yet another embodiment, preferred flea HMT and HNC proteins of the present invention are encoded by nucleic acid molecules comprising apparently full-length HMT or HNC coding regions respectively, i.e., nucleic acid molecules encoding an apparently full-length HMT or HNC proteins.

[0162] Preferred flea HMT and HNC proteins of the present invention can be used to develop inhibitors that, when administered to an animal in an effective manner, are capable of protecting that animal from flea infestation. In accordance with the present invention, the ability of an inhibitor of the present invention to protect an animal from flea infestation refers to the ability of that protein to, for example, treat, ameliorate and/or prevent infestation caused by fleas. In particular, the phrase “to protect an animal from flea infestation” refers to reducing the potential for flea population expansion on and around the animal (i.e., reducing the flea burden). Preferably, the flea population size is decreased, optimally to an extent that the animal is no longer bothered by fleas. A host animal, as used herein, is an animal from which fleas can feed by attaching to and feeding through the skin of the animal. Fleas, and other ectoparasites, can live on a host animal for an extended period of time or can attach temporarily to an animal in order to feed. At any given time, a certain percentage of a flea population can be on a host animal whereas the remainder can be in the environment of the animal. Such an environment can include not only adult fleas, but also flea eggs and/or flea larvae. The environment can be of any size such that fleas in the environment are able to jump onto and off of a host animal. For example, the environment of an animal can include plants, such as crops, from which fleas infest an animal. As such, it is desirable not only to reduce the flea burden on an animal per se, but also to reduce the flea burden in the environment of the animal.

[0163] Suitable fleas to target include any flea that is essentially incapable of causing disease in an animal administered an inhibitor of the present invention. As such, fleas to target include any flea that produces a protein that can be targeted by an inhibitory compound that inhibits a flea HMT or HNC protein function, thereby resulting in the decreased ability of the parasite to cause disease in an animal. Preferred fleas to target include fleas of the following genera: Ctenocephalides, Cyopsyllus, Diamanus (Oropsylla), Echidnophaga, Nosopsyllus, Pulex, Tunga, and Xenopsylla, with those of the species Ctenocephalides canis, Ctenocephalides felis, Diamanus montanus, Echidnophaga gallinacea, Nosopsyllus faciatus, Pulex irritans, Pulex simulans, Tunga penetrans and Xenopsylla cheopis being more preferred, with C. felis being even more preferred. Such fleas are also preferred for the isolation of proteins or nucleic acid molecules of the present invention.

[0164] One embodiment of a flea HMT and/or HNC protein of the present invention is a fusion protein that includes a flea HMT and/or HNC protein-containing domain attached to one or more fusion segments. Suitable fusion segments for use with the present invention include, but are not limited to, segments that can: enhance a protein's stability; act as an immunopotentiator to enhance an immune response against a flea HMT and/or HNC protein; and/or assist in purification of a flea HMT and/or HNC protein (e.g., by affinity chromatography). A suitable fusion segment can be a domain of any size that has the desired function (e.g., imparts increased stability, imparts increased immunogenicity to a protein, and/or simplifies purification of a protein). Fusion segments can be joined to amino and/or carboxyl termini of the flea HMT-containing and/or HNC-containing domain of the protein and can be susceptible to cleavage in order to enable straight-forward recovery of a flea HMT and/or HNC protein. Fusion proteins are preferably produced by culturing a recombinant cell transformed with a fusion nucleic acid molecule that encodes a protein including the fusion segment attached to either the carboxyl and/or amino terminal end of an HMT-containing and/or HNC-containing domain. Preferred fusion segments include a metal binding domain (e.g., a poly-histidine segment); an immunoglobulin binding domain (e.g., Protein A; Protein G; T cell; B cell; Fc receptor or complement protein antibody-binding domains); a sugar binding domain (e.g., a maltose binding domain); and/or a “tag” domain (e.g., at least a portion of β-galactosidase, a strep tag peptide, a T7 tag peptide, a FLAGS peptide, or other domains that can be purified using compounds that bind to the domain, such as monoclonal antibodies). More preferred fusion segments include metal binding domains, such as a poly-histidine segment; a maltose binding domain; a strep tag peptide, such as that available from Biometra in Tampa, Fla.; and an S10 peptide.

[0165] The present invention also includes mimetopes of flea HMT and/or HNC proteins of the present invention. As used herein, a mimetope of a flea HMT and/or HNC protein of the present invention refers to any compound that is able to mimic the activity of such an HMT and/or HNC protein, often because the mimetope has a structure that mimics the particular HMT and/or HNC protein. Mimetopes can be, but are not limited to: peptides that have been modified to decrease their susceptibility to degradation such as all-D retro peptides; anti-idiotypic and/or catalytic antibodies, or fragments thereof; non-proteinaceous immunogenic portions of an isolated protein (e.g., carbohydrate structures); and synthetic or natural organic molecules, including nucleic acids. Such mimetopes can be designed using computer-generated structures of proteins of the present invention. Mimetopes can also be obtained by generating random samples of molecules, such as oligonucleotides, peptides or other organic molecules, and screening such samples by affinity chromatography techniques using the corresponding binding partner.

[0166] Another embodiment of the present invention is an isolated nucleic acid molecule comprising a flea HMT and/or HNC nucleic acid molecule, i.e. a nucleic acid molecule that can be isolated from a HMT cDNA library, from a HNC cDNA library, or from both libraries. As used herein, HMT and HNC nucleic acid molecules has the same meaning as HMT and/or HNC nucleic acid molecule. The identifying characteristics of such nucleic acid molecules are heretofore described. A nucleic acid molecule of the present invention can include an isolated natural flea HMT and/or HNC gene or a homologue thereof, the latter of which is described in more detail below. A nucleic acid molecule of the present invention can include one or more regulatory regions, full-length or partial coding regions, or combinations thereof. The minimal size of a nucleic acid molecule of the present invention is a size sufficient to allow the formation of a stable hybrid (i.e., hybridization under stringent hybridization conditions) with the complementary sequence of another nucleic acid molecule. As such, the minimal size of a HMT and/or HNC nucleic acid molecule of the present invention is from about 12 to about 18 nucleotides in length. Suitable and preferred fleas from which to isolate nucleic acid molecules of the present invention are disclosed herein. Particularly preferred HMT and/or HNC nucleic acid molecules include C. felis HMT and/or HNC nucleic acid molecules.

[0167] In accordance with the present invention, an isolated nucleic acid molecule is a nucleic acid molecule that has been removed from its natural milieu (i.e., that has been subjected to human manipulation) and can include DNA, RNA, or derivatives of either DNA or RNA. As such, “isolated” does not reflect the extent to which the nucleic acid molecule has been purified. Isolated flea HMT and/or HNC nucleic acid molecules of the present invention, or homologues thereof, can be isolated from a natural source or produced using recombinant DNA technology (e.g., polymerase chain reaction (PCR) amplification or cloning) or chemical synthesis. Isolated flea HMT and/or HNC nucleic acid molecules, and homologues thereof, can include, for example, natural allelic variants and nucleic acid molecules modified by nucleotide insertions, deletions, substitutions, and/or inversions in a manner such that the modifications do not substantially interfere with the nucleic acid molecule's ability to encode a HMT and/or HNC protein of the present invention.

[0168] A flea HMT and/or HNC nucleic acid molecule homologue can be produced using a number of methods known to those skilled in the art, see, for example, Sambrook et al., ibid., is incorporated by reference herein in its entirety. For example, nucleic acid molecules can be modified using a variety of techniques including, but not limited to, classic mutagenesis and recombinant DNA techniques such as site-directed mutagenesis, chemical treatment, restriction enzyme cleavage, ligation of nucleic acid fragments, PCR amplification, synthesis of oligonucleotide mixtures and ligation of mixture groups to “build” a mixture of nucleic acid molecules, and combinations thereof. Nucleic acid molecule homologues can be selected by hybridization with flea HMT and/or HNC nucleic acid molecules or by screening the function of a protein encoded by the nucleic acid molecule (e.g., ability to elicit an immune response against at least one epitope of a flea HMT or HNC protein or to effect HMT or HNC activity).

[0169] An isolated nucleic acid molecule of the present invention can include a nucleic acid sequence that encodes at least one flea HMT or HNC protein of the present invention, examples of such proteins being disclosed herein. Although the phrase “nucleic acid molecule” primarily refers to the physical nucleic acid molecule and the phrase “nucleic acid sequence” primarily refers to the sequence of nucleotides on the nucleic acid molecule, the two phrases can be used interchangeably, especially with respect to a nucleic acid molecule, or a nucleic acid sequence, being capable of encoding a flea HMT or HNC protein.

[0170] A preferred nucleic acid molecule of the present invention, when administered to an animal, is capable of protecting that animal from flea infestation. As will be disclosed in more detail below, such a nucleic acid molecule can be, or encode, an antisense RNA, a molecule capable of triple helix formation, a ribozyme, or other nucleic acid-based drug compound. In additional embodiments, a nucleic acid molecule of the present invention can encode a protective protein (e.g., an HMT or HNC protein of the present invention), the nucleic acid molecule being delivered to the animal, for example, by direct injection (i.e, as a genetic vaccine) or in a vehicle such as a recombinant virus vaccine or a recombinant cell vaccine.

[0171] In one embodiment of the present invention, a preferred flea HMT and/or HNC nucleic acid molecule includes an isolated nucleic acid molecule that hybridizes under conditions that preferably allow less than or equal to about 30% base pair mismatch, more preferably under conditions that allow less than or equal to about 25% base pair mismatch, more preferably under conditions that allow less than or equal to about 20% base pair mismatch, more preferably under conditions that allow less than or equal to about 15% base pair mismatch, more preferably under conditions that allow less than or equal to about 10% base pair mismatch and even more preferably under conditions that allow less than or equal to about 5% base pair mismatch with a nucleic acid molecule selected from the group consisting of SEQ ID NO:1, SEQ ID NO:3, SEQ ID NO:4, SEQ ID NO:6, SEQ ID NO:7, SEQ ID NO:9, SEQ ID NO:10, SEQ ID NO:12, SEQ ID NO:13, SEQ ID NO:15, SEQ ID NO:16, SEQ ID NO:18, SEQ ID NO:19, SEQ ID NO:21, SEQ ID NO:22, SEQ ID NO:24, SEQ ID NO:25, SEQ ID NO:27, SEQ ID NO:28, SEQ ID NO:30, SEQ ID NO:31, SEQ ID NO:33, SEQ ID NO:34, SEQ ID NO:36, SEQ ID NO:37, SEQ ID NO:39, SEQ ID NO:40, SEQ ID NO:42, SEQ ID NO:43, SEQ ID NO:45, SEQ ID NO:46, SEQ ID NO:48, SEQ ID NO:153, SEQ ID NO:155, SEQ ID NO:156, SEQ ID NO:158, SEQ ID NO:159, SEQ ID NO:161, SEQ ID NO:162, SEQ ID NO:164, SEQ ID NO:165, SEQ ID NO:167, SEQ ID NO:168, SEQ ID NO:170, SEQ ID NO:1859, SEQ ID NO:1860, SEQ ID NO:1861, SEQ ID NO:1863, SEQ ID NO:1864, SEQ ID NO:1866, SEQ ID NO:1867, SEQ ID NO:1869, SEQ ID NO:1870, SEQ ID NO:1871, SEQ ID NO:1872, SEQ ID NO:1874, SEQ ID NO:1875, SEQ ID NO:1876, SEQ ID NO:1877, SEQ ID NO:1878, SEQ ID NO:1880, SEQ ID NO:1881, SEQ ID NO:1882, SEQ ID NO:1884, SEQ ID NO:1885, SEQ ID NO:1886, SEQ ID NO:1887, SEQ ID NO:1889, SEQ ID NO:1890, SEQ ID NO:1891, SEQ ID NO:1892, SEQ ID NO:1893, SEQ ID NO:1894, SEQ ID NO:1895, SEQ ID NO:1896, SEQ ID NO:1898, SEQ ID NO:1899, SEQ ID NO:1900, SEQ ID NO:1901, SEQ ID NO:1903, SEQ ID NO:1904, SEQ ID NO:1905, SEQ ID NO:1906, SEQ ID NO:1907, SEQ ID NO:1908, SEQ ID NO:1909, SEQ ID NO:1910, SEQ ID NO:1911, SEQ ID NO:1912, SEQ ID NO:1913, SEQ ID NO:1914, SEQ ID NO:1916, SEQ ID NO:1917, SEQ ID NO:1918, SEQ ID NO:1919, SEQ ID NO:1921, SEQ ID NO:1922, SEQ ID NO:1923, SEQ ID NO:1924, SEQ ID NO:1926, SEQ ID NO:1927, SEQ ID NO:1928, SEQ ID NO:1929, and/or SEQ ID NO:1931, a nucleic acid molecule of Table I, Table II, Table III or Table IV and/or a nucleic acid molecule that is complementary to a nucleic acid molecule of Table I, Table II, Table III or Table IV.

[0172] Another embodiment of the present invention includes a HMT and/or HNC nucleic acid molecule, wherein said nucleic acid molecule hybridizes, in a solution comprising 1×SSC and 0% formamide, at a temperature of about 47.5° C., to an isolated nucleic acid molecule selected from the group consisting of SEQ ID NO:1, SEQ ID NO:3, SEQ ID NO:4, SEQ ID NO:6, SEQ ID NO:7, SEQ ID NO:9, SEQ ID NO:10, SEQ ID NO:12, SEQ ID NO:13, SEQ ID NO:15, SEQ ID NO:16, SEQ ID NO:18, SEQ ID NO:19, SEQ ID NO:21, SEQ ID NO:22, SEQ ID NO:24, SEQ ID NO:25, SEQ ID NO:27, SEQ ID NO:28, SEQ ID NO:30, SEQ ID NO:31, SEQ ID NO:33, SEQ ID NO:34, SEQ ID NO:36, SEQ ID NO:37, SEQ ID NO:39, SEQ ID NO:40, SEQ ID NO:42, SEQ ID NO:43, SEQ ID NO:45, SEQ ID NO:46, SEQ ID NO:48, SEQ ID NO:153, SEQ ID NO:155, SEQ ID NO:156, SEQ ID NO:158, SEQ ID NO:159, SEQ ID NO:161, SEQ ID NO:162, SEQ ID NO:164, SEQ ID NO:165, SEQ ID NO:167, SEQ ID NO:168, SEQ ID NO:170, SEQ ID NO:1859, SEQ ID NO:1860, SEQ ID NO:1861, SEQ ID NO:1863, SEQ ID NO:1864, SEQ ID NO:1866, SEQ ID NO:1867, SEQ ID NO:1869, SEQ ID NO:1870, SEQ ID NO:1871, SEQ ID NO:1872, SEQ ID NO:1874, SEQ ID NO:1875, SEQ ID NO:1876, SEQ ID NO:1877, SEQ ID NO:1878, SEQ ID NO:1880, SEQ ID NO:1881, SEQ ID NO:1882, SEQ ID NO:1884, SEQ ID NO:1885, SEQ ID NO:1886, SEQ ID NO:1887, SEQ ID NO:1889, SEQ ID NO:1890, SEQ ID NO:1891, SEQ ID NO:1892, SEQ ID NO:1893, SEQ ID NO:1894, SEQ ID NO:1895, SEQ ID NO:1896, SEQ ID NO:1898, SEQ ID NO:1899, SEQ ID NO:1900, SEQ ID NO:1901, SEQ ID NO:1903, SEQ ID NO:1904, SEQ ID NO:1905, SEQ ID NO:1906, SEQ ID NO:1907, SEQ ID NO:1908, SEQ ID NO:1909, SEQ ID NO:1910, SEQ ID NO:1911, SEQ ID NO:1912, SEQ ID NO:1913, SEQ ID NO:1914, SEQ ID NO:1916, SEQ ID NO:1917, SEQ ID NO:1918, SEQ ID NO:1919, SEQ ID NO:1921, SEQ ID NO:1922, SEQ ID NO:1923, SEQ ID NO:1924, SEQ ID NO:1926, SEQ ID NO:1927, SEQ ID NO:1928, SEQ ID NO:1929, and/or SEQ ID NO:1931, a nucleic acid molecule of Table I, Table II, Table III or Table IV and/or a nucleic acid molecule that is complementary to a nucleic acid molecule of Table I, Table II, Table III or Table IV. Additional preferred nucleic acid molecules of the present invention include oligonucleotides of an isolated nucleic acid molecule, wherein said nucleic acid molecule hybridizes, in a solution comprising 1×SSC and 0% formamide, at a temperature of about 47.5° C., to an isolated nucleic acid molecule selected from the group consisting of SEQ ID NO:1, SEQ ID NO:3, SEQ ID NO:4, SEQ ID NO:6, SEQ ID NO:7, SEQ ID NO:9, SEQ ID NO: O, SEQ ID NO:12, SEQ ID NO:13, SEQ ID NO:15, SEQ ID NO:16, SEQ ID NO:18, SEQ ID NO:19, SEQ ID NO:21, SEQ ID NO:22, SEQ ID NO:24, SEQ ID NO:25, SEQ ID NO:27, SEQ ID NO:28, SEQ ID NO:30, SEQ ID NO:31, SEQ ID NO:33, SEQ ID NO:34, SEQ ID NO:36, SEQ ID NO:37, SEQ ID NO:39, SEQ ID NO:40, SEQ ID NO:42, SEQ ID NO:43, SEQ ID NO:45, SEQ ID NO:46, SEQ ID NO:48, SEQ ID NO:153, SEQ ID NO:155, SEQ ID NO:156, SEQ ID NO:158, SEQ ID NO:159, SEQ ID NO:161, SEQ ID NO:162, SEQ ID NO:164, SEQ ID NO:165, SEQ ID NO:167, SEQ ID NO:168, SEQ ID NO:170, SEQ ID NO:1859, SEQ ID NO:1860, SEQ ID NO:1861, SEQ ID NO:1863, SEQ ID NO:1864, SEQ ID NO:1866, SEQ ID NO:1867, SEQ ID NO:1869, SEQ ID NO:1870, SEQ ID NO:1871, SEQ ID NO:1872, SEQ ID NO:1874, SEQ ID NO:1875, SEQ ID NO:1876, SEQ ID NO:1877, SEQ ID NO:1878, SEQ ID NO:1880, SEQ ID NO:1881, SEQ ID NO:1882, SEQ ID NO:1884, SEQ ID NO:1885, SEQ ID NO:1886, SEQ ID NO:1887, SEQ ID NO:1889, SEQ ID NO:1890, SEQ ID NO:1891, SEQ ID NO:1892, SEQ ID NO:1893, SEQ ID NO:1894, SEQ ID NO:1895, SEQ ID NO:1896, SEQ ID NO:1898, SEQ ID NO:1899, SEQ ID NO:1900, SEQ ID NO:1901, SEQ ID NO:1903, SEQ ID NO:1904, SEQ ID NO:1905, SEQ ID NO:1906, SEQ ID NO:1907, SEQ ID NO:1908, SEQ ID NO:1909, SEQ ID NO:1910, SEQ ID NO:1911, SEQ ID NO:1912, SEQ ID NO:1913, SEQ ID NO:1914, SEQ ID NO:1916, SEQ ID NO:1917, SEQ ID NO:1918, SEQ ID NO:1919, SEQ ID NO:1921, SEQ ID NO:1922, SEQ ID NO:1923, SEQ ID NO:1924, SEQ ID NO:1926, SEQ ID NO:1927, SEQ ID NO:1928, SEQ ID NO:1929, and/or SEQ ID NO:1931, a nucleic acid molecule of Table I, Table II, Table III or Table IV and/or a nucleic acid molecule that is complementary to a nucleic acid molecule of Table I, Table II, Table III or Table IV, wherein said oligonucleotide comprises at least about 18 nucleotides.

[0173] Additional preferred flea HMT and/or HNC nucleic acid molecules of the present invention include nucleic acid molecules comprising a nucleic acid sequence that is preferably at least about 70%, more preferably at least about 75%, more preferably at least about 80% more preferably at least about 85%, more preferably at least about 90%, and even more preferably at least about 95% identical to a nucleic acid sequence selected from the group consisting of SEQ I D NO:1, SEQ ID NO:3, SEQ ID NO:4, SEQ ID NO:6, SEQ ID NO:7, SEQ ID NO:9, SEQ ID NO:10, SEQ ID NO:12, SEQ ID NO:13, SEQ ID NO:15, SEQ ID NO:16, SEQ ID NO:18, SEQ ID NO:19, SEQ ID NO:21, SEQ ID NO:22, SEQ ID NO:24, SEQ ID NO:25, SEQ ID NO:27, SEQ ID NO:28, SEQ ID NO:30, SEQ ID NO:31, SEQ ID NO:33, SEQ ID NO:34, SEQ ID NO:36, SEQ ID NO:37, SEQ ID NO:39, SEQ ID NO:40, SEQ ID NO:42, SEQ ID NO:43, SEQ ID NO:45, SEQ ID NO:46, SEQ ID NO:48, SEQ ID NO:153, SEQ ID NO:155, SEQ ID NO:156, SEQ ID NO:158, SEQ ID NO:159, SEQ ID NO:161, SEQ ID NO:162, SEQ ID NO:164, SEQ ID NO:165, SEQ ID NO:167, SEQ ID NO:168, SEQ ID NO:170, SEQ ID NO:1859, SEQ ID NO:1860, SEQ ID NO:1861, SEQ ID NO:1863, SEQ ID NO:1864, SEQ ID NO:1866, SEQ ID NO:1867, SEQ ID NO:1869, SEQ ID NO:1870, SEQ ID NO:1871, SEQ ID NO:1872, SEQ ID NO:1874, SEQ ID NO:1875, SEQ ID NO:1876, SEQ ID NO:1877, SEQ ID NO:1878, SEQ ID NO:1880, SEQ ID NO:1881, SEQ ID NO:1882, SEQ ID NO:1884, SEQ ID NO:1885, SEQ ID NO:1886, SEQ ID NO:1887, SEQ ID NO:1889, SEQ ID NO:1890, SEQ ID NO:1891, SEQ ID NO:1892, SEQ ID NO:1893, SEQ ID NO:1894, SEQ ID NO:1895, SEQ ID NO:1896, SEQ ID NO:1898, SEQ ID NO:1899, SEQ ID NO:1900, SEQ ID NO:1901, SEQ ID NO:1903, SEQ ID NO:1904, SEQ ID NO:1905, SEQ ID NO:1906, SEQ ID NO:1907, SEQ ID NO:1908, SEQ ID NO:1909, SEQ ID NO:1910, SEQ ID NO:1911, SEQ ID NO:1912, SEQ ID NO:1913, SEQ ID NO:1914, SEQ ID NO:1916, SEQ ID NO:1917, SEQ ID NO:1918, SEQ ID NO:1919, SEQ ID NO:1921, SEQ ID NO:1922, SEQ ID NO:1923, SEQ ID NO:1924, SEQ ID NO:1926, SEQ ID NO:1927, SEQ ID NO:1928, SEQ ID NO:1929, and/or SEQ ID NO:1931, a nucleic acid molecule of Table I, Table II, Table III or Table IV and/or a nucleic acid molecule that is complementary to a nucleic acid molecule of Table I, Table II, Table III or Table IV. Also preferred are oligonucleotides of any of such nucleic acid molecules. Percent identity may be determined using the GCG® Wisconsin Package Version 9.0 sequence analysis software, using default parameters.

[0174] One embodiment of the present invention is a nucleic acid molecule comprising all or part of nucleic acid molecules nCfALN₂₀₅₇, nCfALN₁₁₅₂, nCfCBP₁₁₂₈, nCfCBP₈₁₆, nCfNKAB₁₇₁₄, nCfNKAB₉₇₈ nCfLGIC₂₂₄₀, nCfLGIC₁₇₀₇, nCfANON₁₄₂₉, nCfANON₁₁₉₄, nCfMALV₇₆₅, nCfMALV₇₆₂, nCfOSD₆₀₄, nCfOSD₄₀₅, nCfNMDA₁₂₂₇, nCfNMDA₇₃₈, nCfCLBP1A₆₃₃, nCfCLBP1A₄₄₁, nCfCLBP2A₆₃₁, nCfCLBP2A441, nCfLGIC₂₇₃₉, nCfLGIC₂₀₁₆, nCfNAH₂₀₈₀, nCfNAH₁₈₂₄, nCfCLIC₂₂₈₃, nCfCLIC₇₈₆, nCfPL2₁₂₉₁, nCfPL2₁₁₇₃, nCfPL3₄₀₆, nCfPL3₂₄₃, nCfPL4₉₇₄, nCfPL4₁₀₄₃, nCfPL4₁₀₆₂, nCfPL4₈₅₅, nCfSVP₁₈₇₅, nCfSVP₁₅₉₀, nCfVGCC₃₈₁, nCfVGCC₂₁₉₁, nCfVGCC₁₉₆₈, nCfVGCC₆₇₃, nCfVGCC₃₁₂₆, nCfVGCC₂₅₅₃, nCfAUP₁₁₈₁, nCfAUP₃₀₆, nCf7B2₂₁₆₁, nCf7B2₈₀₁, nCf7B2₇₄₁, or allelic variants of these nucleic acid molecules. Another preferred nucleic acid molecule of the present invention includes at least a portion of nucleic acid sequence SEQ ID NO:1, SEQ ID NO:3, SEQ ID NO:4, SEQ ID NO:6, SEQ ID NO:7, SEQ ID NO:9, SEQ ID NO:10, SEQ ID NO:12, SEQ ID NO:13, SEQ ID NO:15, SEQ ID NO:16, SEQ ID NO:18, SEQ ID NO:19, SEQ ID NO:21, SEQ ID NO:22, SEQ ID NO:24, SEQ ID NO:25, SEQ ID NO:27, SEQ ID NO:28, SEQ ID NO:30, SEQ ID NO:31, SEQ ID NO:33, SEQ ID NO:34, SEQ ID NO:36, SEQ ID NO:37, SEQ ID NO:39, SEQ ID NO:40, SEQ ID NO:42, SEQ ID NO:43, SEQ ID NO:45, SEQ ID NO:46, SEQ ID NO:48, SEQ ID NO:153, SEQ ID NO:155, SEQ ID NO:156, SEQ ID NO:158, SEQ ID NO:159, SEQ ID NO:161, SEQ ID NO:162, SEQ ID NO:164, SEQ ID NO:165, SEQ ID NO:167, SEQ ID NO:168, SEQ ID NO:170, SEQ ID NO:1859, SEQ ID NO:1860, SEQ ID NO:1861, SEQ ID NO:1863, SEQ ID NO:1864, SEQ ID NO:1866, SEQ ID NO:1867, SEQ ID NO:1869, SEQ ID NO:1870, SEQ ID NO:1871, SEQ ID NO:1872, SEQ ID NO:1874, SEQ ID NO:1875, SEQ ID NO:1876, SEQ ID NO:1877, SEQ ID NO:1878, SEQ ID NO:1880, SEQ ID NO:1881, SEQ ID NO:1882, SEQ ID NO:1884, SEQ ID NO:1885, SEQ ID NO:1886, SEQ ID NO:1887, SEQ ID NO:1889, SEQ ID NO:1890, SEQ ID NO:1891, SEQ ID NO:1892, SEQ ID NO:1893, SEQ ID NO:1894, SEQ ID NO:1895, SEQ ID NO:1896, SEQ ID NO:1898, SEQ ID NO:1899, SEQ ID NO:1900, SEQ ID NO:1901, SEQ ID NO:1903, SEQ ID NO:1904, SEQ ID NO:1905, SEQ ID NO:1906, SEQ ID NO:1907, SEQ ID NO:1908, SEQ ID NO:1909, SEQ ID NO:1910, SEQ ID NO:1911, SEQ ID NO:1912, SEQ ID NO:1913, SEQ ID NO:1914, SEQ ID NO:1916, SEQ ID NO:1917, SEQ ID NO:1918, SEQ ID NO:1919, SEQ ID NO:1921, SEQ ID NO:1922, SEQ ID NO:1923, SEQ ID NO:1924, SEQ ID NO:1926, SEQ ID NO:1927, SEQ ID NO:1928, SEQ ID NO:1929, and/or SEQ ID NO:1931, and/or a nucleic acid molecule of Table I, Table II, Table III or Table IV, as well as allelic variants of nucleic acid molecules having these nucleic acid sequences and homologues of nucleic acid molecules having these nucleic acid sequences; preferably such a homologue encodes or is complementary to a nucleic acid molecule that encodes at least one epitope that elicits an immune response against a protein having an amino acid sequence SEQ ID NO:2, SEQ ID NO:8, SEQ ID NO:14, SEQ ID NO:20, SEQ ID NO:26, SEQ ID NO:32, SEQ ID NO:38, SEQ ID NO:44, SEQ ID NO:154, SEQ ID NO:160, SEQ ID NO:163, SEQ ID NO:169, SEQ ID NO:1862, SEQ ID NO:1868, SEQ ID NO:1873, SEQ ID NO:1879, SEQ ID NO:1883, SEQ ID NO:1888, SEQ ID NO:1897, SEQ ID NO:1902, SEQ ID NO:1915, SEQ ID NO:1920, SEQ ID NO:1925, and/or SEQ ID NO:1930. Such nucleic acid molecules can include nucleotides in addition to those included in the SEQ ID NOs, such as, but not limited to, a full-length gene, a full-length coding region, a nucleic acid molecule encoding a fusion protein, or a nucleic acid molecule encoding a multivalent protective compound.

[0175] In one embodiment, HMT and/or HNC nucleic acid molecule of the present invention encodes a protein that is at least about 70%, preferably at least about 75%, more preferably at least about 80%, even more preferably at least about 85%, even more preferably at least about 90%, even more preferably at least about 95%, even more preferably at least about 98%, and even more preferably at least about 100% identical to PCfALN₃₈₄, PCfCBP₂₇₂, PCfNKAB₃₂₆, PCfLGIC₅₆₉, PCfANON₃₉₈, PCfMALV₂₅₄, PCfOSD₁₃₅, PCfNMDA₂₄₆, PCfCLBP1A₁₄₇, PCfCLBP2A₁₄₇, PCfLGIC₆₇₂, PCfNAH₆₀₈, PCfCLIC₂₆₂, PCfPL2₃₉₁, PCfPL3₈₁, PCfPL4₂₈₅, PCfSVP₅₃₀, PCfVGCC₈₅₁, PCfAUP₁₀₂, PCf7B2₂₆₇, PCf7B2₂₄₇ and/or a protein encoded by a nucleic acid molecule having a sequence of Table I, Table II, Table III and/or Table IV.

[0176] In one embodiment, a HMT and/or HNC nucleic acid molecule of the present invention encodes a protein having an amino acid sequence that is at least about 70%, preferably at least about 75%, more preferably at least about 80%, even more preferably at least about 85%, even more preferably at least about 90%, even more preferably at least about 95%, even more preferably at least about 98%, and even more preferably at least about 100% identical to SEQ ID NO:2, SEQ ID NO:8, SEQ ID NO:14, SEQ ID NO:20, SEQ ID NO:26, SEQ ID NO:32, SEQ ID NO:38, SEQ ID NO:44, SEQ ID NO:154, SEQ ID NO:160, SEQ ID NO:163, SEQ ID NO:169, SEQ ID NO:1862, SEQ ID NO:1868, SEQ ID NO:1873, SEQ ID NO:1879, SEQ ID NO:1883, SEQ ID NO:1888, SEQ ID NO:1897, SEQ ID NO:1902, SEQ ID NO:1915, SEQ ID NO:1920, SEQ ID NO:1925, and/or SEQ ID NO:1930 and/or a protein encoded by a nucleic acid molecule having a sequence of Table I, Table II, Table III and/or Table IV. The present invention also includes a HMT and/or HNC nucleic acid molecule encoding a protein having at least a portion of SEQ ID NO:2, SEQ ID NO:8, SEQ ID NO:14, SEQ ID NO:20, SEQ ID NO:26, SEQ ID NO:32, SEQ ID NO:38, SEQ ID NO:44, SEQ ID NO:154, SEQ ID NO:160, SEQ ID NO:163, SEQ ID NO:169, SEQ ID NO:1862, SEQ ID NO:1868, SEQ ID NO:1873, SEQ ID NO:1879, SEQ ID NO:1883, SEQ ID NO:1888, SEQ ID NO:1897, SEQ ID NO:1902, SEQ ID NO:1915, SEQ ID NO:1920, SEQ ID NO:1925, and/or SEQ ID NO:1930 and/or a protein encoded by a nucleic acid molecule having a sequence of Table I, Table II, Table III and/or Table IV, as well as allelic variants of a nucleic acid molecule encoding a protein having these sequences, including nucleic acid molecules that have been modified to accommodate codon usage properties of the cells in which such nucleic acid molecules are to be expressed.

[0177] In another embodiment, a preferred flea HMT and/or HNC nucleic acid molecule of the present invention comprises a nucleic acid molecule comprising at least about 15 nucleotides, more preferably at least about 18 nucleotides, more preferably at least about 20 nucleotides, more preferably at least about 25 nucleotides, more preferably at least about 30 nucleotides, more preferably at least about 40 nucleotides, more preferably at least about 50 nucleotides, more preferably at least about 100 nucleotides, more preferably at least about 150 nucleotides, more preferably at least about 350 nucleotides, more preferably at least about 450 nucleotides, more preferably at least about 550 nucleotides, more preferably at least about 650 nucleotides, more preferably at least about 750 nucleotides, more preferably at least about 1000 nucleotides, more preferably at least about 1500 nucleotides, more preferably at least about 1750 nucleotides more preferably at least about 2000 nucleotides, and even more preferably at least about 2250 nucleotides in length.

[0178] In another embodiment, a preferred flea HMT and/or HNC nucleic acid molecule encodes a protein comprising at least about 5 amino acids, preferably at least about 6 amino acids, more preferably at least about 10 amino acids, more preferably at least about 15 amino acids, more preferably at least about 20 amino acids, more preferably at least about 25 amino acids, more preferably at least about 30 amino acids, more preferably at least about 40 amino acids, more preferably at least about 50 amino acids, more preferably at least about 100 amino acids, more preferably at least about 150 amino acids, more preferably at least about 200 amino acids, more preferably at least about 300 amino acids, more preferably at least about 400 amino acids, more preferably at least about 500 amino acids, even more preferably at least about 560 amino acids in length.

[0179] In another embodiment, a preferred flea HMT and/or HNC nucleic acid molecule of the present invention comprises an apparently full-length HMT and/or HNC coding region, i.e., the preferred nucleic acid molecule encodes an apparently full-length HMT and/or HNC protein, or a post-translationally modified protein thereof. In one embodiment, a preferred HMT and/or HNC nucleic acid molecule of the present invention encodes a mature protein.

[0180] In another embodiment, a preferred flea HMT and/or HNC nucleic acid molecule of the present invention comprises a nucleic acid molecule comprising SEQ ID NO:1, SEQ ID NO:3, SEQ ID NO:4, SEQ ID NO:6, SEQ ID NO:7, SEQ ID NO:9, SEQ ID NO:1, SEQ ID NO:12, SEQ ID NO:13, SEQ ID NO:15, SEQ ID NO:16, SEQ ID NO:18, SEQ ID NO:19, SEQ ID NO:21, SEQ ID NO:22, SEQ ID NO:24, SEQ ID NO:25, SEQ ID NO:27, SEQ ID NO:28, SEQ ID NO:30, SEQ ID NO:31, SEQ ID NO:33, SEQ ID NO:34, SEQ ID NO:36, SEQ ID NO:37, SEQ ID NO:39, SEQ ID NO:40, SEQ ID NO:42, SEQ ID NO:43, SEQ ID NO:45, SEQ ID NO:46, SEQ ID NO:48, SEQ ID NO:153, SEQ ID NO:155, SEQ ID NO:156, SEQ ID NO:158, SEQ ID NO:159, SEQ ID NO:161, SEQ ID NO:162, SEQ ID NO:164, SEQ ID NO:165, SEQ ID NO:167, SEQ ID NO:168, SEQ ID NO:170, SEQ ID NO:1859, SEQ ID NO:1860, SEQ ID NO:1861, SEQ ID NO:1863, SEQ ID NO:1864, SEQ ID NO:1866, SEQ ID NO:1867, SEQ ID NO:1869, SEQ ID NO:1870, SEQ ID NO:1871, SEQ ID NO:1872, SEQ ID NO:1874, SEQ ID NO:1875, SEQ ID NO:1876, SEQ ID NO:1877, SEQ ID NO:1878, SEQ ID NO:1880, SEQ ID NO:1881, SEQ ID NO:1882, SEQ ID NO:1884, SEQ ID NO:1885, SEQ ID NO:1886, SEQ ID NO:1887, SEQ ID NO:1889, SEQ ID NO:1890, SEQ ID NO:1891, SEQ ID NO:1892, SEQ ID NO:1893, SEQ ID NO:1894, SEQ ID NO:1895, SEQ ID NO:1896, SEQ ID NO:1898, SEQ ID NO:1899, SEQ ID NO:1900, SEQ ID NO:1901, SEQ ID NO:1903, SEQ ID NO:1904, SEQ ID NO:1905, SEQ ID NO:1906, SEQ ID NO:1907, SEQ ID NO:1908, SEQ ID NO:1909, SEQ ID NO:1910, SEQ ID NO:1911, SEQ ID NO:1912, SEQ ID NO:1913, SEQ ID NO:1914, SEQ ID NO:1916, SEQ ID NO:1917, SEQ ID NO:1918, SEQ ID NO:1919, SEQ ID NO:1921, SEQ ID NO:1922, SEQ ID NO:1923, SEQ ID NO:1924, SEQ ID NO:1926, SEQ ID NO:1927, SEQ ID NO:1928, SEQ ID NO:1929, and/or SEQ ID NO:1931.

[0181] Knowing the nucleic acid sequences of certain flea HMT and/or HNC nucleic acid molecules of the present invention allows one skilled in the art to, for example, (a) make copies of those nucleic acid molecules, (b) obtain nucleic acid molecules including at least a portion of such nucleic acid molecules (e.g., nucleic acid molecules including full-length genes, full-length coding regions, regulatory control sequences, truncated coding regions), and (c) obtain other flea HMT and/or HNC nucleic acid molecules. Such nucleic acid molecules can be obtained in a variety of ways including screening appropriate expression libraries with antibodies of the present invention; traditional cloning techniques using oligonucleotide probes of the present invention to screen appropriate libraries; and PCR amplification of appropriate libraries or DNA using oligonucleotide primers of the present invention. Preferred libraries to screen or from which to amplify nucleic acid molecules include flea 1^{st} instar larvae; 3^{rd} instar larvae, wandering larvae, prepupal larvae, pupae and whole adult flea cDNA libraries as well as genomic DNA libraries. Similarly, preferred DNA sources to screen or from which to amplify nucleic acid molecules include flea prepupal cDNA, adult cDNA and genomic DNA. Techniques to clone and amplify genes are disclosed, for example, in Sambrook et al., ibid.

[0182] The present invention also includes nucleic acid molecules that are oligonucleotides capable of hybridizing, under stringent hybridization conditions, with complementary regions of other, preferably longer, nucleic acid molecules of the present invention such as those comprising C. felis HMT and/or HNC nucleic acid molecules or other flea HMT and/or HNC nucleic acid molecules. Oligonucleotides of the present invention can be RNA, DNA, or derivatives of either. The minimum size of such oligonucleotides is the size required for formation of a stable hybrid between an oligonucleotide and a complementary sequence on a nucleic acid molecule of the present invention. A preferred oligonucleotide of the present invention has a maximum size of preferably about 100 to 200 nucleotides. The present invention includes oligonucleotides that can be used as, for example, probes to identify nucleic acid molecules, primers to produce nucleic acid molecules, or therapeutic reagents to inhibit flea HMT and/or HNC protein production or activity (e.g., as antisense-, triplex formation-, ribozyme- and/or RNA drug-based reagents). The present invention also includes the use of such oligonucleotides to protect animals from disease using one or more of such technologies. Appropriate oligonucleotide-containing therapeutic compositions can be administered to an animal using techniques known to those skilled in the art.

[0183] One embodiment of the present invention includes a recombinant vector, which includes at least one isolated nucleic acid molecule of the present invention, inserted into any vector capable of delivering the nucleic acid molecule into a host cell. Such a vector contains heterologous nucleic acid sequences, that is nucleic acid sequences that are not naturally found adjacent to nucleic acid molecules of the present invention and that preferably are derived from a species other than the species from which the nucleic acid molecule(s) are derived. The vector can be either RNA or DNA, either prokaryotic or eukaryotic, and typically is a virus or a plasmid. Recombinant vectors can be used in the cloning, sequencing, and/or otherwise manipulating of flea HMT and/or HNC nucleic acid molecules of the present invention.

[0184] One type of recombinant vector, referred to herein as a recombinant molecule, comprises a nucleic acid molecule of the present invention operatively linked to an expression vector. The phrase operatively linked refers to insertion of a nucleic acid molecule into an expression vector in a manner such that the molecule is able to be expressed when transformed into a host cell. As used herein, an expression vector is a DNA or RNA vector that is capable of transforming a host cell and of effecting expression of a specified nucleic acid molecule. Preferably, the expression vector is also capable of replicating within the host cell. Expression vectors can be either prokaryotic or eukaryotic, and are typically viruses or plasmids. Expression vectors of the present invention include any vectors that function (i.e., direct gene expression) in recombinant cells of the present invention, including in bacterial, fungal, parasite, insect, other animal, and plant cells. Preferred expression vectors of the present invention can direct gene expression in bacterial, yeast, insect and mammalian cells, and more preferably in the cell types disclosed herein.

[0185] In particular, expression vectors of the present invention contain regulatory sequences such as transcription control sequences, translation control sequences, origins of replication, and other regulatory sequences that are compatible with the recombinant cell and that control the expression of nucleic acid molecules of the present invention. In particular, recombinant molecules of the present invention include transcription control sequences. Transcription control sequences are sequences that control the initiation, elongation, and termination of transcription. Particularly important transcription control sequences are those which control transcription initiation, such as promoter, enhancer, operator and repressor sequences. Suitable transcription control sequences include any transcription control sequence that can function in at least one of the recombinant cells of the present invention. A variety of such transcription control sequences are known to those skilled in the art. Preferred transcription control sequences include those that function in bacterial, yeast, or insect and mammalian cells, such as, but not limited to, tac, lac, trp, trc, oxy-pro, omp/lpp, rmB, bacteriophage lambda (such as lambda PL and lambda P_{R} and fusions that include such promoters), bacteriophage T7, T7lac, bacteriophage T3, bacteriophage SP6, bacteriophage SP01, metallothionein, alpha-mating factor, Pichia alcohol oxidase, alphavirus subgenomic promoter, antibiotic resistance gene, baculovirus, Heliothis zea insect virus, vaccinia virus, herpesvirus, raccoon poxvirus, other poxvirus, adenovirus, cytomegalovirus (such as immediate early promoter), simian virus 40, retrovirus, actin, retroviral long terminal repeat, Rous sarcoma virus, heat shock, phosphate and nitrate transcription control sequences as well as other sequences capable of controlling gene expression in prokaryotic or eukaryotic cells. Additional suitable transcription control sequences include tissue-specific promoters and enhancers as well as lymphokine-inducible promoters (e.g., promoters inducible by interferons or interleukins). Transcription control sequences of the present invention can also include naturally occurring transcription control sequences naturally associated with fleas, such as C. felis transcription control sequences.

[0186] Suitable and preferred nucleic acid molecules to include in recombinant vectors of the present invention are as disclosed herein. Preferred nucleic acid molecules to include in recombinant vectors, and particularly in recombinant molecules, include nucleic acid molecules having a sequence of Table I, Table II, Table III and/or Table IV. Particularly preferred nucleic acid molecules to include in recombinant vectors, and particularly in recombinant molecules, include nCfALN₂₀₅₇, nCfALN₁₁₅₂, nCfCBP₁₁₂₈, nCfCBP₈₁₆, nCfNKAB₁₇₁₄, nCfNKAB₉₇₈ nCfLGIC₂₂₄₀, nCfLGIC₁₇₀₇, nCfANON₁₄₂₉, nCfANON₁₁₉₄, nCfMALV₇₆₅, nCfMALV₇₆₂, nCfOSD₆₀₄, nCfOSD₄₀₅, nCfNMDA₁₂₂₇, nCfNMDA₇₃₈, nCfCLBP1A₆₃₃, nCfCLBP1A₄₄₁, nCfCLBP2A₆₃₁, nCfCLBP2A₄₄₁, nCfLGIC₂₇₃₉, nCfLGIC₂₀₁₆, nCfNAH₂₀₈₀, nCfNAH₁₈₂₄, nCfCLIC₂₂₈₃, nCfCLIC₇₈₆, nCfPL2₁₂₉₁, nCfPL2₁₁₇₃, nCfPL3₄₀₆, nCfPL3₂₄₃, nCfPL4₉₇₄, nCfPL4₁₀₄₃, nCfPL4₁₀₆₂, nCfPL4₈₅₅, nCfSVP₁₈₇₅, nCfSVP₁₅₉₀, nCfVGCC₃₈₁, nCfVGCC₂₁₉₁, nCfVGCC₁₉₆₈, nCfVGCC₆₇₃, nCfVGCC₃₁₂₆, nCfVGCC₂₅₅₃, nCfAUP₁₁₈₁, nCfAUP₃₀₆, nCf7B2₂₁₆₁, nCf7B2₈₀₁, nCf7B2₇₄₁.

[0187] Recombinant molecules of the present invention may also (a) contain secretory signals (i.e., signal segment nucleic acid sequences) to enable an expressed flea protein of the present invention to be secreted from the cell that produces the protein and/or (b) contain fusion sequences which lead to the expression of nucleic acid molecules of the present invention as fusion proteins. Examples of suitable signal segments include any signal segment capable of directing the secretion of a protein of the present invention. Preferred signal segments include, but are not limited to, tissue plasminogen activator (t-PA), interferon, interleukin, growth hormone, histocompatibility and viral envelope glycoprotein signal segments. Suitable fusion segments encoded by fusion segment nucleic acids are disclosed herein. In addition, a nucleic acid molecule of the present invention can be joined to a fusion segment that directs the encoded protein to the proteosome, such as a ubiquitin fusion segment. Eukaryotic recombinant molecules may also include intervening and/or untranslated sequences surrounding and/or within the nucleic acid sequences of nucleic acid molecules of the present invention.

[0188] Another embodiment of the present invention includes a recombinant cell comprising a host cell transformed with one or more recombinant molecules of the present invention. Transformation of a nucleic acid molecule into a cell can be accomplished by any method by which a nucleic acid molecule can be inserted into the cell. Transformation techniques include, but are not limited to, transfection, electroporation, microinjection, lipofection, adsorption, and protoplast fusion. A recombinant cell may remain unicellular or may grow into a tissue, organ or a multicellular organism. It is to be noted that a cell line refers to any recombinant cell of the present invention that is not a transgenic animal. Transformed nucleic acid molecules of the present invention can remain extrachromosomal or can integrate into one or more sites within a chromosome of the transformed (i.e., recombinant) cell in such a manner that their ability to be expressed is retained. Preferred nucleic acid molecules with which to transform a cell include C. felis HMT and HNC nucleic acid molecules disclosed herein. Preferred nucleic acid molecules with which to transform a cell include nucleic acid molecules having a sequence of Table I, Table II, Table III and/or Table IV. Particularly preferred nucleic acid molecules with which to transform a cell include nCfALN₂₀₅₇, nCfALN₁₁₅₂, nCfCrBP₁₁₂₈, nCfCBP₈₁₆, nCfNKAB₁₇₁₄, nCfNKAB₉₇₈ nCfLGIC₂₂₄₀, nCfLGIC₁₇₀₇, nCfANON₁₄₂₉, nCfANON₁₁₉₄, nCfMALV₇₆₅, nCfMALV₇₆₂, nCfOSD₆₀₄, nCfOSD₄₀₅, nCfNMDA₁₂₂₇, nCfNMDA₇₃₈, nCfCLBP1A₆₃₃, nCfCLBP1A₄₄₁, nCfCLBP2A₆₃₁, nCfCLBP2A₄₄₁, nCfLGIC₂₇₃₉, nCfLGIC₂₀₁₆, nCfNAH₂₀₈₀, nCfNAH₁₈₂₄, nCfCLIC₂₂₈₃, nCfCLIC₇₈₆, nCfPL2₁₂₉₁, nCfPL2₁₁₇₃, nCfPL3₄₀₆, nCfPL3₂₄₃, nCfPL4₉₇₄, nCfPL4₁₀₄₃, nCfPL4₁₀₆₂, nCfPL4₈₅₅, nCfSVP₁₈₇₅, nCfSVP₁₅₉₀, nCfVGCC₃₈₁, nCfVGCC₂₁₉₁, nCfVGCC₁₉₆₈, nCfVGCC₆₇₃, nCfVGCC₃₁₂₆, nCfVGCC₂₅₅₃, nCfAUP₁₁₈₁, nCfAUP₃₀₆, nCf7B2₂₁₆₁, nCf7B2₈₀₁, or nCf7B2₇₄₁.

[0189] Suitable host cells to transform include any cell that can be transformed with a nucleic acid molecule of the present invention. Host cells can be either untransformed cells or cells that are already transformed with at least one nucleic acid molecule (e.g., nucleic acid molecules encoding one or more proteins of the present invention and/or other proteins useful in the production of multivalent vaccines). Host cells of the present invention either can be endogenously (i.e., naturally) capable of producing flea HMT and/or HNC proteins of the present invention or can be capable of producing such proteins after being transformed with at least one nucleic acid molecule of the present invention. Host cells of the present invention can be any cell capable of producing at least one protein of the present invention, and include bacterial, fungal (including yeast), parasite (including helminth, protozoa and ectoparasite), other insect, other animal and plant cells. Preferred host cells include bacterial, mycobacterial, yeast, insect and mammalian cells. More preferred host cells include Salmonella, Escherichia, Bacillus, Caulobacter, Listeria, Saccharomyces, Pichia, Spodoptera, Mycobacteria, Trichoplusia, BHK (baby hamster kidney) cells, MDCK cells (Madin-Darby canine kidney cell line), CRFK cells (Crandell feline kidney cell line), CV-1 cells (African monkey kidney cell line used, for example, to culture raccoon poxvirus), COS (e.g., COS-7) cells, and Vero cells. Particularly preferred host cells are Escherichia colt, including E. coli K-12 derivatives; Salmonella typhi; Salmonella typhimurium, including attenuated strains such as UK-1 _{χ}3987 and SR-11 _{χ}4072; Caulobacter; Pichia; Spodoptera frugiperda; Trichoplusia ni; BHK cells; MDCK cells; CRFK cells; CV-1 cells; COS cells; Vero cells; and non-tumorigenic mouse myoblast GS cells (e.g., ATCC CRL 1246). Additional appropriate mammalian cell hosts include other kidney cell lines, other fibroblast cell lines (e.g., human, murine or chicken embryo fibroblast cell lines), myeloma cell lines, Chinese hamster ovary cells, mouse NIH/3T3 cells, LMTK³¹ cells and/or HeLa cells. In one embodiment, the proteins may be expressed as heterologous proteins in myeloma cell lines employing immunoglobulin promoters.

[0190] A recombinant cell is preferably produced by transforming a host cell with one or more recombinant molecules, each comprising one or more nucleic acid molecules of the present invention operatively linked to an expression vector containing one or more transcription control sequences, examples of which are disclosed herein. The phrase operatively linked refers to insertion of a nucleic acid molecule into an expression vector in a manner such that the molecule is able to be expressed when transformed into a host cell.

[0191] A recombinant cell of the present invention includes any cell transformed with at least one of any nucleic acid molecule of the present invention. Suitable and preferred nucleic acid molecules as well as suitable and preferred recombinant molecules with which to transfer cells are disclosed herein.

[0192] Recombinant cells of the present invention can also be co-transformed with one or more recombinant molecules including flea HMT and/or HNC nucleic acid molecules encoding one or more proteins of the present invention and one or more other nucleic acid molecules encoding other protective compounds, as disclosed herein (e.g., to produce multivalent vaccines).

[0193] Recombinant DNA technologies can be used to improve expression of transformed nucleic acid molecules by manipulating, for example, the number of copies of the nucleic acid molecules within a host cell, the efficiency with which those nucleic acid molecules are transcribed, the efficiency with which the resultant transcripts are translated, and the efficiency of post-translational modifications. Recombinant techniques useful for increasing the expression of nucleic acid molecules of the present invention include, but are not limited to, operatively linking nucleic acid molecules to high-copy number plasmids, integration of the nucleic acid molecules into one or more host cell chromosomes, addition of vector stability sequences to plasmids, substitutions or modifications of transcription control signals (e.g., promoters, operators, enhancers), substitutions or modifications of translational control signals (e.g., ribosome binding sites, Shine-Dalgarno sequences), modification of nucleic acid molecules of the present invention to correspond to the codon usage of the host cell, deletion of sequences that destabilize transcripts, and use of control signals that temporally separate recombinant cell growth from recombinant enzyme production during fermentation. The activity of an expressed recombinant protein of the present invention may be improved by fragmenting, modifying, or derivatizing nucleic acid molecules encoding such a protein.

[0194] Isolated flea HMT and/or HNC proteins of the present invention can be produced in a variety of ways, including production and recovery of natural proteins, production and recovery of recombinant proteins, and chemical synthesis of the proteins. In one embodiment, an isolated protein of the present invention is produced by culturing a cell capable of expressing the protein under conditions effective to produce the protein, and recovering the protein. A preferred cell to culture is a recombinant cell of the present invention. Effective culture conditions include, but are not limited to, effective media, bioreactor, temperature, pH and oxygen conditions that permit protein production. An effective, medium refers to any medium in which a cell is cultured to produce a flea HMT and/or HNC protein of the present invention. Such medium typically comprises an aqueous medium having assimilable carbon, nitrogen and phosphate sources, and appropriate salts, minerals, metals and other nutrients, such as vitamins. Cells of the present invention can be cultured in conventional fermentation bioreactors, shake flasks, test tubes, microtiter dishes, and petri plates. Culturing can be carried out at a temperature, pH and oxygen content appropriate for a recombinant cell. Such culturing conditions are within the expertise of one of ordinary skill in the art. Examples of suitable conditions are included in the Examples section.

[0195] Depending on the vector and host system used for production, resultant proteins of the present invention may either remain within the recombinant cell; be secreted into the fermentation medium; be secreted into a space between two cellular membranes, such as the periplasmic space in E. coli; or be retained on the outer surface of a cell or viral membrane.

[0196] The phrase “recovering the protein”, as well as similar phrases, refers to collecting the whole fermentation medium containing the protein and need not imply additional steps of separation or purification. Proteins of the present invention can be purified using a variety of standard protein purification techniques, such as, but not limited to, affinity chromatography, ion exchange chromatography, filtration, electrophoresis, hydrophobic interaction chromatography, gel filtration chromatography, reverse phase chromatography, concanavalin A chromatography, chromatofocusing and differential solubilization. Proteins of the present invention are preferably retrieved in “substantially pure” form. As used herein, “substantially pure” refers to a purity that allows for the effective use of the protein as a therapeutic composition or diagnostic. A therapeutic composition for animals, for example, should exhibit no substantial toxicity and preferably should be capable of stimulating the production of antibodies in a treated animal.

[0197] The present invention also includes isolated (i.e., removed from their natural milieu) antibodies that selectively bind to a flea HMT and/or HNC protein of the present invention or a mimetope thereof (e.g., anti-C. felis HMT or HNC antibodies). As used herein, the term “selectively binds to” an HMT and/or HNC protein refers to the ability of antibodies of the present invention to preferentially bind to specified proteins and mimetopes thereof of the present invention. Binding can be measured using a variety of methods standard in the art including enzyme immunoassays (e.g., ELISA), immunoblot assays, etc.; see, for example, Sambrook et al., ibid., and Harlow, et al., 1988, Antibodies, a Laboratory Manual, Cold Spring Harbor Labs Press; Harlow et al., ibid., is incorporated by reference herein in its entirety. An anti-HMT or anti-HNC antibody of the present invention preferably selectively binds to a flea HMT or HNC protein respectively in such a way as to inhibit the function of that protein.

[0198] Isolated antibodies of the present invention can include antibodies in serum, or antibodies that have been purified to varying degrees. Antibodies of the present invention can be polyclonal or monoclonal, or can be functional equivalents such as antibody fragments and genetically-engineered antibodies, including single chain antibodies or chimeric antibodies that can bind to one or more epitopes.

[0199] A preferred method to produce antibodies of the present invention includes (a) administering to an animal an effective amount of a protein, peptide or mimetope thereof of the present invention to produce the antibodies and (b) recovering the antibodies. In another method, antibodies of the present invention are produced recombinantly using techniques as heretofore disclosed to produce HMT and/or HNC proteins of the present invention. Antibodies raised against defined proteins or mimetopes can be advantageous because such antibodies are not substantially contaminated with antibodies against other substances that might otherwise cause interference in a diagnostic assay or side effects if used in a therapeutic composition.

[0200] Antibodies of the present invention have a variety of potential uses that are within the scope of the present invention. For example, such antibodies can be used (a) as therapeutic compounds to passively immunize an animal in order to protect the animal from fleas susceptible to treatment by such antibodies and/or (b) as tools to screen expression libraries and/or to recover desired proteins of the present invention from a mixture of proteins and other contaminants. Furthermore, antibodies of the present invention can be used to target cytotoxic agents to fleas in order to directly kill such fleas. Targeting can be accomplished by conjugating (i.e., stably joining) such antibodies to the cytotoxic agents using techniques known to those skilled in the art. Suitable cytotoxic agents are known to those skilled in the art.

[0201] One embodiment of the present invention is a therapeutic composition that, when administered to an animal susceptible to flea infestation, is capable of protecting that animal from flea infestation. Therapeutic compositions of the present invention include at least one of the following protective molecules: an isolated flea HMT and/or HNC protein; a mimetope of an isolated flea HMT and/or HNC protein; an isolated flea HMT and/or HNC nucleic acid molecule; and/or a compound derived from said isolated flea HMT and/or HNC protein that inhibits HMT and/or HNC protein activity. A therapeutic composition of the present invention can further comprise a component selected from the group of an excipient, a carrier, and/or an adjuvant; these components are described further herein. As used herein, a protective molecule or protective compound refers to a compound that, when administered to an animal in an effective manner, is able to treat, ameliorate, and/or prevent flea infestation. Preferred fleas to target are heretofore disclosed. One example of a protective molecule is a vaccine, such as, but not limited to, a naked nucleic acid vaccine, a recombinant virus vaccine, a recombinant cell vaccine, and a recombinant protein vaccine. Another example of a protective molecule is a compound that inhibits HMT and/or HNC protein activity, such as an isolated antibody that selectively binds to a flea HMT and/or HNC protein, a substrate analog of a flea HMT and/or HNC protein, anti-sense-, triplex formation-, ribozyme-, and/or RNA drug-based compounds, or other inorganic or organic molecules that inhibit HMT and/or HNC protein activity. Inhibiting flea HMT and/or HNC protein activity can refer to the ability of a compound to reduce the activity of flea HMT and/or HNC proteins. Inhibiting flea HMT and/or HNC protein activity can also refer to the ability of a compound to reduce the amount of flea HMT and/or HNC protein in a flea.

[0202] Another embodiment of the present invention includes a method to reduce a flea infestation in an animal susceptible to flea infestation. Such a method includes the step of administering to the animal a therapeutic molecule comprising a protective compound selected from the group consisting of (a) an isolated flea HMT and/or HNC protein; (b) a mimetope of an isolated flea HMT and/or HNC protein; (c) an isolated flea HMT and/or HNC nucleic acid molecule; and (d) a compound derived from an isolated flea HMT and/or HNC protein that inhibits HMT and/or HNC protein activity.

[0203] Therapeutic compositions of the present invention can be administered to any animal susceptible to flea infestation, preferably to mammals, and more preferably to dogs, cats, humans, ferrets, horses, cattle, sheep, and other pets, economic food animals, work animals and/or zoo animals. Preferred animals to protect against flea infestation include dogs, cats, humans, and ferrets, with dogs and cats being particularly preferred.

[0204] As used herein, the term derived, or the term derived from, refers to a peptide, antibody, mimetope, nucleic acid molecule, or other compound that was obtained from a flea HMT and/or HNC protein or nucleic acid molecule of the present invention. Methods to obtain derivatives from a HMT and/or HNC molecule of the present invention are known in the art, and as such include, but are not limited to molecular modeling of HMT and/or HNC proteins to determine active sites, i.e. sites that interact with other molecules, and predicting from these active sites smaller fragments and/or mimetopes that retain and/or mimic these active sites, thereby inhibiting HMT and/or HNC protein activity; screening of peptide or small chemical compound libraries against HMT and/or HNC proteins of the present invention; and screening of polyclonal or monoclonal antibodies to find antibodies that specifically bind HMT and/or HNC proteins of the present invention.

[0205] A HMT and/or HNC protein inhibitor of the present invention is identified by its ability to bind to, modify, or otherwise interact with, a flea HMT and/or HNC protein, thereby inhibiting the activity of HMT and/or HNC proteins. Suitable inhibitors of HMT and/or HNC protein activity are compounds that inhibit HMT and/or HNC protein activity in at least one of a variety of ways: (a) by binding to or otherwise interacting with or otherwise modifying HMT and/or HNC protein sites; (b) by binding to or otherwise interacting with or otherwise modifying the HMT and/or HNC protein active site; (c) by binding to the HMT and/or HNC protein and thus reducing the availability of the HMT and/or HNC protein in solution; and (d) by interacting with other regions of the HMT and/or HNC protein to inhibit HMT and/or HNC protein activity, for example, by allosteric interaction.

[0206] Flea HMT and/or HNC protein inhibitors can be used directly as compounds in compositions of the present invention to treat animals as long as such compounds are not harmful to host animals being treated. Preferred HMT and/or HNC protein inhibitors of the present invention include, but are not limited to, flea HMT and/or HNC protein substrate analogs, and other molecules that bind to a flea HMT and/or HNC proteins (e.g., to an allosteric site) in such a manner that the activity of the flea HMT and/or HNC protein is inhibited. A HMT and/or HNC protein substrate analog refers to a compound that interacts with (e.g., binds to, associates with, modifies) the active site of a HMT and/or HNC protein. A preferred HMT and/or HNC protein substrate analog inhibits HMT and/or HNC protein activity. HMT and/or HNC protein substrate analogs can be of any inorganic or organic composition. HMT and/or HNC protein substrate analogs can be, but need not be, structurally similar to a HMT and/or HNC protein natural substrate as long as they can interact with the active site of that HMT and/or HNC protein. HMT and/or HNC protein substrate analogs can be designed using computer-generated structures of HMT and/or HNC proteins of the present invention or computer structures of HMT and/or HNC protein's natural substrates. Preferred sites to model include one or more of the active sites of HMT and/or HNC protein. Substrate analogs can also be obtained by generating random samples of molecules, such as oligonucleotides, peptides, peptidomimetic compounds, or other inorganic or organic molecules, and screening such samples for their ability to interfere with interaction between HMT and/or HNC proteins and their substrates, e.g. by affinity chromatography techniques. A preferred HMT and/or HNC protein substrate analog is a HMT and/or HNC protein mimetic compound, i.e., a compound that is structurally and/or functionally similar to a natural substrate of a HMT and/or HNC protein of the present invention, particularly to the region of the substrate that interacts with the HMT and/or HNC protein active site, but that inhibits HMT and/or HNC protein activity upon interacting with the HMT and/or HNC protein active site.

[0207] The present invention also includes a therapeutic composition comprising at least one protective molecule of the present invention in combination with at least one additional compound protective against one or more infectious agents.

[0208] In one embodiment, a therapeutic composition of the present invention can be used to protect an animal from flea infestation by administering such composition to a flea in order to prevent infestation. Such administration to the flea and/or animal could be oral, or by application to the animal's body surface (e.g. topical spot-on, or spraying onto the animal), or by application to the environment (e.g., spraying). Examples of such compositions include, but are not limited to, transgenic vectors capable of producing at least one therapeutic composition of the present invention. In another embodiment a flea can ingest therapeutic compositions, or products thereof, present on the surface of or in the blood of a host animal that has been administered a therapeutic composition of the present invention.

[0209] In accordance with the present invention, a host animal (i.e., an animal that is or is capable of being infested with fleas) is treated by administering to the animal a therapeutic composition of the present invention in such a manner that the composition itself (e.g., a HMT and/or HNC protein inhibitor, a HMT and/or HNC protein synthesis suppressor (i.e., a compound that decreases the production or half-life of a HMT and/or HNC protein in fleas), a HMT and/or HNC protein mimetope, or a anti-HMT and/or HNC antibody) or a product generated by the animal in response to administration of the composition (e.g., antibodies produced in response to administration of a flea HMT and/or HNC protein or nucleic acid molecule, or conversion of an inactive inhibitor “prodrug” to an active HMT and/or HNC protein inhibitor) ultimately enters the flea. A host animal is preferably treated in such a way that the compound or product thereof is present on the body surface of the animal or enters the blood stream of the animal. Fleas are then exposed to the composition or product when they feed from the animal. For example, flea HMT and/or HNC protein inhibitors administered to an animal are administered in such a way that the inhibitors enter the blood stream of the animal, where they can be taken up by feeding fleas.

[0210] The present invention also includes the ability to reduce larval flea infestation in that when fleas feed from a host animal that has been administered a therapeutic composition of the present invention, at least a portion of compounds of the present invention, or products thereof, in the blood taken up by the fleas are excreted by the fleas in feces, which is subsequently ingested by flea larvae. In particular, it is of note that flea larvae obtain most, if not all, of their nutrition from flea feces.

[0211] In accordance with the present invention, reducing HMT and/or HNC protein activity in a flea can lead to a number of outcomes that reduce flea burden on treated animals and their surrounding environments. Such outcomes include, but are not limited to, (a) reducing the viability of fleas that feed from the treated animal, (b) reducing the fecundity of female fleas that feed from the treated animal, (c) reducing the reproductive capacity of male fleas that feed from the treated animal, (d) reducing the viability of eggs laid by female fleas that feed from the treated animal, (e) altering the blood feeding behavior of fleas that feed from the treated animal (e.g., fleas take up less volume per feeding or feed less frequently), (f) reducing the viability of flea larvae, for example due to the feeding of larvae from feces of fleas that feed from the treated animal, (g) altering the development of flea larvae (e.g., by decreasing feeding behavior, inhibiting growth, inhibiting (e.g., slowing or blocking) molting, and/or otherwise inhibiting maturation to adults), and/or (h) altering or decreasing the ability of fleas or flea larvae to digest a blood meal.

[0212] In order to protect an animal from flea infestation, a therapeutic composition of the present invention is administered to the animal in an effective manner such that the composition is capable of protecting that animal from flea infestation. Therapeutic compositions of the present invention can be administered to animals prior to infestation in order to prevent infestation (i.e., as a preventative vaccine) and/or can be administered to animals after infestation. For example, proteins, mimetopes thereof, and antibodies thereof can be used as immunotherapeutic agents.

[0213] Therapeutic compositions of the present invention can be formulated in an excipient that the animal to be treated can tolerate. Examples of such excipients include water, saline, Ringer's solution, dextrose solution, Hank's solution, and other aqueous physiologically balanced salt solutions. Nonaqueous vehicles, such as fixed oils, sesame oil, ethyl oleate, or triglycerides may also be used. Other useful formulations include suspensions containing viscosity enhancing agents, such as sodium carboxymethylcellulose, sorbitol, or dextran. Excipients can also contain minor amounts of additives, such as substances that enhance isotonicity and chemical stability. Examples of buffers include phosphate buffer, bicarbonate buffer and Tris buffer, while examples of preservatives include thimerosal, or o-cresol, formalin and benzyl alcohol. Standard formulations can either be liquid injectables or solids which can be taken up in a suitable liquid as a suspension or solution for injection. Thus, in a non-liquid formulation, the excipient can comprise dextrose, human serum albumin, preservatives, etc., to which sterile water or saline can be added prior to administration.

[0214] In one embodiment of the present invention, a therapeutic composition can include an adjuvant. Adjuvants are agents that are capable of enhancing the immune response of an animal to a specific antigen. Suitable adjuvants include, but are not limited to, cytokines, chemokines, and compounds that induce the production of cytokines and chemokines (e.g., granulocyte macrophage colony stimulating factor (GM-CSF), Flt-3 ligand, granulocyte colony stimulating factor (G-CSF), macrophage colony stimulating factor (M-CSF), colony stimulating factor (CSF), erythropoietin (EPO), interleukin 2 (IL-2), interleukin-3 (IL-3), interleukin 4 (IL4), interleukin 5 (IL-5), interleukin 6 (IL-6), interleukin 7 (IL-7), interleukin 8 (IL-8), interleukin 10 (IL-10), interleukin 12 (IL-12), interferon gamma, interferon gamma inducing factor I (IGIF), transforming growth factor beta, RANTES (regulated upon activation, normal T cell expressed and presumably secreted), macrophage inflammatory proteins (e.g., MIP-1 alpha and MIP-1 beta), and Leishmania elongation initiating factor (LEIF)); bacterial components (e.g., endotoxins, in particular superantigens, exotoxins and cell wall components); aluminum-based salts; calcium-based salts; silica; polynucleotides; toxoids; serum proteins, viral coat proteins; block copolymer adjuvants (e.g., Hunter's TITERMAX® adjuvant (Vaxcel, Inc. Norcross, Ga.), Ribi adjuvants (Ribi ImmunoChem Research, Inc., Hamilton, Mont.); and saponins and their derivatives (e.g., Quil A (Superfos Biosector A/S, Denmark). Protein adjuvants of the present invention can be delivered in the form of the protein themselves or of nucleic acid molecules encoding such proteins using the methods described herein.

[0215] In one embodiment of the present invention, a therapeutic composition can include a carrier. Carriers include compounds that increase the half-life of a therapeutic composition in the treated animal. Suitable carriers include, but are not limited to, polymeric controlled release vehicles, biodegradable implants, liposomes, bacteria, viruses, other cells, oils, esters, and glycols.

[0216] One embodiment of the present invention is a controlled release formulation that is capable of slowly releasing a composition of the present invention into an animal. As used herein, a controlled release formulation comprises a composition of the present invention in a controlled release vehicle. Suitable controlled release vehicles include, but are not limited to, biocompatible polymers, other polymeric matrices, capsules, microcapsules, microparticles, bolus preparations, osmotic pumps, diffusion devices, liposomes, lipospheres, and transdermal delivery systems. Other controlled release formulations of the present invention include liquids that, upon administration to an animal, form a solid or a gel in situ. Preferred controlled release formulations are biodegradable (i.e., bioerodible).

[0217] A preferred controlled release formulation of the present invention is capable of releasing a composition of the present invention into the blood of the treated animal at a constant rate sufficient to attain therapeutic dose levels of the composition to protect an animal from flea infestation. The therapeutic composition is preferably released over a period of time ranging from about 1 to about 12 months. A controlled release formulation of the present invention is capable of effecting a treatment preferably for at least about 1 month, more preferably for at least about 3 months, even more preferably for at least about 6 months, even more preferably for at least about 9 months, and even more preferably for at least about 12 months.

[0218] Acceptable protocols to administer therapeutic compositions in an effective manner include individual dose size, number of doses, frequency of dose administration, and mode of administration. Determination of such protocols can be accomplished by those skilled in the art. A suitable single dose is a dose that is capable of protecting an animal from disease when administered one or more times over a suitable time period. For example, a preferred single dose of a protein, mimetope or antibody therapeutic composition, including a recombinant protein vaccine, is from about 1 microgram (μg) to about 10 milligrams (mg) of the therapeutic composition per kilogram body weight of the animal. Booster vaccinations can be administered from about 2 weeks to several years after the original administration. Booster administrations preferably are administered when the immune response of the animal becomes insufficient to protect the animal from disease. A preferred administration schedule is one in which from about 10 μg to about 1 mg of the therapeutic composition per kg body weight of the animal is administered from about one to about two times over a time period of from about 2 weeks to about 12 months. Modes of administration can include, but are not limited to, subcutaneous, intradermal, intravenous, intranasal, oral, transdermal, intraocular, intranasal, conjunctival, and intramuscular routes. Methods of administration for other therapeutic compounds can be determined by one skilled in the art, and may include administration of a therapeutic composition one or more times, on a daily, weekly, monthly or yearly regimen; routes of administration can be determined by one skilled in the art, and may include any route. A preferred route of administration of an inhibitory compound when administering to fleas is a topical, or “spot-on” formulation administered to the body surface of the animal, so that a flea would encounter the inhibitory compound when attached to the animal; another preferred route of administration of an inhibitory compound is an oral formulation that, when fed to an animal, would enter the bloodstream of the animal, which would then be transferred to a flea while feeding from the animal.

[0219] A recombinant protein vaccine of the present invention comprises a recombinantly-produced flea HMT and/or HNC protein of the present invention that is administered to an animal according to a protocol that results in the animal producing a sufficient immune response to protect itself from a flea infestation. Such protocols can be determined by those skilled in the art.

[0220] According to one embodiment, a nucleic acid molecule of the present invention can be administered to an animal in a fashion to enable expression of that nucleic acid molecule into a protective protein or protective RNA (e.g., antisense RNA, ribozyme, triple helix forms or RNA drug) in the animal. Nucleic acid molecules can be delivered to an animal in a variety of methods including, but not limited to, (a) administering a naked (i.e., not packaged in a viral coat or cellular membrane) nucleic acid as a genetic vaccine (e.g., as naked DNA or RNA molecules, such as is taught, for example in Wolff et al., 1990, Science 247, 1465-1468) or (b) administering a nucleic acid molecule packaged as a recombinant virus vaccine or as a recombinant cell vaccine (i.e., the nucleic acid molecule is delivered by a viral or cellular vehicle).

[0221] A genetic (i.e., naked nucleic acid) vaccine of the present invention includes a nucleic acid molecule of the present invention and preferably includes a recombinant molecule of the present invention that preferably is replication, or otherwise amplification, competent. A genetic vaccine of the present invention can comprise one or more nucleic acid molecules of the present invention in the form of, for example, a dicistronic recombinant molecule. Preferred genetic vaccines include at least a portion of a viral genome, i.e., a viral vector. Preferred viral vectors include those based on alphaviruses, poxviruses, adenoviruses, herpesviruses, picornaviruses, and retroviruses, with those based on alphaviruses, such as sindbis or Semliki forest virus, species-specific herpesviruses and poxviruses being particularly preferred. Any suitable transcription control sequence can be used, including those disclosed as suitable for protein production. Particularly preferred transcription control sequences include cytomegalovirus immediate early preferably in conjunction with Intron-A), Rous sarcoma virus long terminal repeat, and tissue-specific transcription control sequences, as well as transcription control sequences endogenous to viral vectors if viral vectors are used. The incorporation of a “strong” polyadenylation signal is also preferred.

[0222] Genetic vaccines of the present invention can be administered in a variety of ways, with intramuscular, subcutaneous, intradermal, transdermal, conjunctival, intraocular, intranasal and oral routes of administration being preferred. A preferred single dose of a genetic vaccine ranges from about 1 nanogram (ng) to about 600 μg, depending on the route of administration and/or method of delivery, as can be determined by those skilled in the art. Suitable delivery methods include, for example, by injection, as drops, aerosolized and/or topically. Genetic vaccines of the present invention can be contained in an aqueous excipient (e.g., phosphate buffered saline) alone or in a carrier (e.g., lipid-based vehicles).

[0223] A recombinant virus vaccine of the present invention includes a recombinant molecule of the present invention that is packaged in a viral coat and that can be expressed in an animal after administration. Preferably, the recombinant molecule is packaging- or replication-deficient and/or encodes an attenuated virus. A number of recombinant viruses can be used, including, but not limited to, those based on alphaviruses, poxviruses, adenoviruses, herpesviruses, picornaviruses, and retroviruses. Preferred recombinant virus vaccines are those based on alphaviruses (such as Sindbis virus), raccoon poxviruses, species-specific herpesviruses and species-specific poxviruses. An example of methods to produce and use alphavirus recombinant virus vaccines are disclosed in U.S. Pat. No. 5,766,602 to Xiong and Grieve, which is incorporated by reference herein in its entirety.

[0224] When administered to an animal, a recombinant virus vaccine of the present invention infects cells within the immunized animal and directs the production of a protective protein or RNA nucleic acid molecule that is capable of protecting the animal from flea infestation as disclosed herein. For example, a recombinant virus vaccine comprising a flea HMT and/or HNC nucleic acid molecule of the present invention is administered according to a protocol that results in the animal producing a sufficient immune response to protect itself from flea infestation. A preferred single dose of a recombinant virus vaccine of the present invention is from about 1×10⁴ to about 1×10⁸ virus plaque forming units (pfu) per kilogram body weight of the animal. Administration protocols are similar to those described herein for protein-based vaccines, with subcutaneous, intramuscular, intranasal, intraocular, conjunctival, and oral administration routes being preferred.

[0225] A recombinant cell vaccine of the present invention includes recombinant cells of the present invention that express at least one protein of the present invention. Preferred recombinant cells for this embodiment include Salmonella, E. coli, Listeria, Mycobacterium, S. frugiperda, yeast, (including Saccharomyces cerevisiae and Pichia pastoris), BHK, CV-1, myoblast G8, COS (e.g., COS-7), Vero, MDCK and CRFK recombinant cells. Recombinant cell vaccines of the present invention can be administered in a variety of ways but have the advantage that they can be administered orally, preferably at doses ranging from about 10⁸ to about 10¹² cells per kilogram body weight. Administration protocols are similar to those described herein for protein-based vaccines. Recombinant cell vaccines can comprise whole cells, cells stripped of cell walls or cell lysates.

[0226] The efficacy of a therapeutic composition of the present invention to protect an animal from flea infestation can be tested in a variety of ways including, but not limited to, detection of protective antibodies (using, for example, proteins or mimetopes of the present invention), detection of cellular immunity within the treated animal, or challenge of the treated animal with the fleas to determine whether the treated animal is resistant to infestation. Challenge studies can include direct administration of fleas to the treated animal. In one embodiment, therapeutic compositions can be tested in animal models such as mice. Such techniques are known to those skilled in the art.

[0227] One therapeutic composition of the present invention includes an inhibitor of flea HMT and/or HNC protein activity, i.e., a compound capable of substantially interfering with the function of a flea HMT and/or HNC protein susceptible to inhibition by an inhibitor of flea HMT and/or HNC protein activity. An inhibitor of HMT and/or HNC protein activity can be identified using flea HMT and/or HNC proteins of the present invention. An inhibitor of HMT and/or HNC protein function can be identified using flea HMT and/or HNC proteins of the present invention. A preferred inhibitor of HMT and/or HNC protein function is a compound capable of substantially interfering with the function of a flea HMT and/or HNC protein and which does not substantially interfere with host animal proteins. As used herein, a compound that does not substantially inhibit or interfere with host animal proteins is one that, when administered to a host animal, the host animal shows no significant adverse effects attributable to the compound and which, when administered to an animal in an effective manner, is capable of protecting that animal from flea infestation.

[0228] One embodiment of the present invention is a method to identify a compound capable of inhibiting HMT and/or HNC protein activity of a flea. Such a method includes the steps of (a) contacting (e.g., combining, mixing) an isolated flea HMT and/or HNC protein, preferably a C. felis HMT and/or HNC protein of the present invention, with a putative inhibitory compound under conditions in which, in the absence of the compound, the protein has HMT and/or HNC protein activity, and (b) determining if the putative inhibitory compound inhibits the activity. HMT and/or HNC protein activity can be determined in a variety of ways known in the art, including but not limited to determining the ability of HMT and/or HNC protein to bind to or otherwise interact with a substrate. Such conditions under which a HMT and/or HNC protein has HMT and/or HNC protein activity include conditions in which a HMT and/or HNC protein has a correct three-dimensionally folded structure under physiologic conditions, i.e. physiologic pH, physiologic ionic concentrations, and physiologic temperatures.

[0229] Putative inhibitory compounds to screen include antibodies (including fragments and mimetopes thereof), putative substrate analogs, and other, preferably small, organic or inorganic molecules. Methods to determine HMT and/or HNC protein activity are known to those skilled in the art; see, for example, the Examples section of the present application. Methods to determine binding of a putative inhibitory compound to a HMT and/or HNC protein of the present invention are known to those of skill in the art and include, for example, determining changes in molecular mass using surface plasmon resonance (e.g., determining light scatter by an inhibitor of a HMT and/or HNC protein, before and after contacting the inhibitor or protein with a HMT and/or HNC protein or inhibitor, respectively) or screening for compounds that inhibit interaction between a HMT and/or HNC protein and a substrate.

[0230] A preferred method to identify a compound capable of inhibiting HMT and/or HNC protein activity includes contacting an isolated flea HMT and/or HNC protein having an amino acid sequence selected from the group consisting of: (a) a protein comprising an amino acid sequence selected from the group consisting of SEQ ID NO:2, SEQ ID NO:8, SEQ ID NO:14, SEQ ID NO:20, SEQ ID NO:26, SEQ ID NO:32, SEQ ID NO:38, SEQ ID NO:44, SEQ ID NO:154, SEQ ID NO:160, SEQ ID NO:163, SEQ ID NO:169, SEQ ID NO:1862, SEQ ID NO:1868, SEQ ID NO:1873, SEQ ID NO:1879, SEQ ID NO:1883, SEQ ID NO:1888, SEQ ID NO:1897, SEQ ID NO:1902, SEQ ID NO:1915, SEQ ID NO:1920, SEQ ID NO:1925, and/or SEQ ID NO:1930, and/or a protein encoded by a nucleic acid molecule of Table I, Table II, Table III and/or Table IV; (b) a protein comprising an at least 25 consecutive amino acid portion identical in sequence to a consecutive amino acid portion of a sequence as set forth in (a), wherein the protein has HMT and/or HNC protein activity; (c) a protein comprising a fragment of a protein as set forth in (a), wherein the fragment has an activity selected from the group consisting of binding to a HMT and/or HNC molecule and hydrolyzing a HMT and/or HNC protein substrate; and (d) a protein encoded by an allelic variant of a nucleic acid molecule that encodes any protein of (a), (b), or (c), with a putative inhibitory compound under conditions in which, in the absence of the compound, the protein has HMT and/or HNC protein activity; and determining if the putative inhibitory compound inhibits the activity.

[0231] Another embodiment of the present invention is an assay kit to identify an inhibitor of a flea HMT and/or HNC protein of the present invention. This kit comprises an isolated flea HMT and/or HNC protein of the present invention, and a means for determining inhibition of an activity of flea HMT and/or HNC protein, where the means enables detection of inhibition. Detection of inhibition of flea HMT and/or HNC protein identifies a putative inhibitor to be an inhibitor of flea HMT and/or HNC protein. Means for determining inhibition of flea HMT and/or HNC protein include an assay system that detects binding of a putative inhibitor to a flea HMT and/or HNC molecule, and an assay system that detects interference by a putative inhibitor of the ability of flea HMT and/or HNC protein to hydrolyze a substrate. Means and methods are described herein and are known to those skilled in the art.

[0232] The following examples are provided for the purposes of illustration and are not intended to limit the scope of the present invention. The following examples include a number of recombinant DNA and protein chemistry techniques known to those skilled in the art; see, for example, Sambrook et al., ibid.

### Example 1

[0233] This Example describes the isolation of RNA from the hindgut and Malpighian tubules (HMT) of Ctenocephalides felis and the use of isolated RNA to construct subtracted and unsubtracted cDNA libraries.

[0234] Approximately 10,000 hindguts and Malpighian tubules were dissected from equal numbers of cat blood fed and unfed adult C. felis with a male to female ratio of 1 to 4, and total RNA was extracted using a guanidine isothiocyanate lysis buffer and the standard procedure described by Sambrook et al. Poly-A enriched mRNA was purified from total RNA above using a mRNA Purification Kit, available from Pharmacia Biotech, Piscataway, N.J., following the manufacturer's protocol. The same procedures were used to extract total RNA and isolate poly-A enriched mRNA from the dissected C. felis bodies following removal of HMT, referred to hereinafter as “non-HMT mRNA”.

[0235] Poly-A enriched mRNA was used to construct a cDNA library using subtractive hybridization and suppression PCR as follows. Subtractive hybridization and suppression PCR was conducted using a PCR-SELECT™ cDNA Subtraction Kit, available from Clontech Laboratories, Inc., Palo Alto, Calif. according to the manufacturer's instructions. Briefly, this kit uses subtractive hybridization and suppression PCR to specifically amplify cDNA sequences that are present in the tester cDNA and absent in the driver cDNA, thus enriching for tester-specific sequences. The efficiency of the subtraction process can be assessed by semi-quantitative PCR and by comparing the ethidium bromide staining patterns of the subtracted and unsubtracted samples on agarose gels as described in section V.D. of the manufacturer's protocol. For the semi-quantitative PCR, three genes with mRNAs known to be expressed outside of the HMT tissue were used to test for specific subtraction. These genes encoded putative actin, N-aminopeptidase, and serine protease proteins.

[0236] Subtractive hybridization and suppression PCR was conducted under the following conditions. Two micrograms (μg) of HMT mRNA was used as the template for synthesis of the tester material and 2 μg of non-HMT mRNA was used as template for synthesis of the driver material in this reaction. The number of cycles used in the selective amplification steps was optimized using the manufacturer's protocols. Optimization resulted in the use of 24 rather than the standard 27 cycles of primary PCR in combination with 15 cycles of secondary PCR rather than the standard 12 cycles.

[0237] The products from the suppressive PCR reaction were ligated into the pCR®2.1 vector, available from Invitrogen, Carlsbad, Calif., using an Original TA CLONING® Kit, available from Invitrogen. The ligation reaction was then used to transform INVαF′ ONE SHOT® competent cells, available from Invitrogen, which were plated on Luria broth (LB) agar with 50 micrograms per milliliter (μg/ml) ampicillin, available from Sigma-Aldrich Co., St. Louis, Mo., and 50 μg/ml 5-bromo-4-chloro-3-indoyl β-D-galactopyranoside (X-Gal), available from Fisher Biotech, Fair Lawn, N.J. Transformed colonies were amplified and the DNA isolated using the standard alkaline lysis procedure described by Sambrook et al., ibid.

[0238] Automated cycle sequencing of DNA samples was performed using an ABI PRISM® Model 377, available from Perkins Elmer, with XL upgrade DNA Sequencer, available from PE Applied Biosystems, Foster City, Calif., after reactions were carried out using the PRISM® Dye Terminator Cycle Sequencing Ready Reaction Kit or the PRISM® dRhodamine Terminator Cycle Sequencing Ready Reaction Kit or the PRISM® BIG-DYE® Terminator Cycle sequencing Ready Reaction Kit, available from PE Applied Biosystems, following the manufacturer's protocol, hereinafter “standard sequencing methods”. Sequence analysis was performed using the MACVECTOR™ sequence analysis software, available from International Biotechnologies Inc., New Haven, Conn., and the Wisconsin Package Version 9.0 sequence analysis software, available from Genetics Computer Group (GCG), Madison, Wis., hereinafter referred to as GCG® version 9.0, using default parameters. Each sequence read was trimmed of vector sequence at either end and submitted for a search through the National Center for Biotechnology Information (NCBI), National Library of Medicine, National Institute of Health, Baltimore, Md., using the BLAST network. This database includes SwissProt+PIR+SPupdate+GenPept+GPUpdate+PDB databases. The search was conducted using the xBLAST function, which compares the translated sequences in all 6 reading frames to the protein sequences contained in the database. Clones with significant homology to sequences in the GENBANK® database were grouped according to proposed function and are listed in Table II. Clones with no significant homology to sequences in the GENBANK® database were searched manually for open reading frames and are listed in Table IV.

[0239] An unsubtracted HMT cDNA library was constructed as follows. Approximately 10,000 HMT tissues were dissected from equal numbers of unfed and cat blood-fed adult C. felis with a male to female ratio of 1:4. Total RNA was extracted using a guanidine isothiocyanate lysis buffer and procedures described in Sambrook et al., followed by isolation using a mRNA purification kit, available from Pharmacia, according to the manufacturer's protocols. The library was constructed with 5 fig of isolated mRNA using a ZAP-cDNAs cDNA synthesis kit, and packaged using a ZAP-CDNA® GIGAPACK® gold cloning kit, both available from Stratagene, La Jolla, Calif. The resultant HMT library was amplified to a titer of about 5×10⁹ plaque forming units per milliliter (pfu/ml). Single clone excisions were performed using the EX-ASSIST® helper phage, available from Stratagene, and used to create double stranded plasmid template for sequencing using the manufacturer's protocols with the following exceptions. Following incubation of the SOLR cells with the cleared phage lysate, the mixture was used to inoculate LB broth, and the mix was incubated overnight and then subjected to mini-prep plasmid preparation and sequencing as described for the subtracted HMT library above.

### Example 2

[0240] This Example describes the isolation of RNA from the head and nerve cord (HNC) of Ctenocephalides felis and the use of isolated RNA to construct subtracted and unsubtracted cDNA libraries.

[0241] Approximately 4,000 heads and attached nerve cords, including the terminal abdominal ganglia were dissected from equal numbers of cat blood-fed and unfed adult C. felis with a male to female ratio of 1 to 4, and total RNA was extracted using a guanidine isothiocyanate lysis buffer and the standard procedure described by Sambrook et al. Approximately 618 μg of total RNA was recovered. Poly-A enriched mRNA was purified from total RNA above using a mRNA Purification Kit, available from Pharmacia, following the manufacturer's protocol. Approximately 13 fig of mRNA was isolated. The same procedures were used to extract total RNA and isolate poly-A enriched mRNA from the dissected C. felis bodies following removal of HNC tissues, referred to hereinafter as “non-HNC mRNA”.

[0242] Suppression subtractive PCR was conducted as described in Example 1 using a PCR-SELECT™ cDNA Subtraction kit, available from Clontech, under the following conditions. Two micrograms (μg) of HNC mRNA was used as the template for synthesis of the tester material and 2 μg of non-HMT mRNA was used as template for synthesis of the driver material in this reaction. The number of cycles used in the selective amplification steps was optimized using the manufacturer's protocols. Optimization resulted in the use of 24 rather than the standard 27 cycles of primary PCR in combination with either 12 or 15 cycles of secondary PCR.

[0243] cDNA pools from various PCR cycling combinations were ligated into the TA vector using a TA CLONING® kit, available from Invitrogen. Aliquots of ligation reaction were transformed into Ultramax DH5∝® bacteria, available from Gibco-BRL, Gaithersburg, Md. Portions of the transformation mixes were used to inoculate LB broth cultures containing 100 μg/ml of ampicillin. The overnight cultures were plated to generate discreet colonies which were used individually for overnight cultures for plasmid preps. Transformed colonies were amplified and the DNA isolated using the standard alkaline lysis procedure described by Sambrook et al., ibid.

[0244] Automated cycle sequencing of DNA samples was performed using the standard sequencing methods described in Example 1. Sequence analysis was performed using the MACVECTOR™ sequence analysis software, available from International Biotechnologies Inc., New Haven, Conn., and the Wisconsin Package Version 9.0 sequence analysis software, available from Genetics Computer Group (GCG), Madison, Wis., hereinafter referred to as GCG® version 9.0, using default parameters. Each sequence read was trimmed of vector sequence at either end and submitted for a xBLAST search as described in Example 1. Clones with significant homology to sequences in the GENBANK® database were grouped according to proposed function and are listed in Table I. Clones with no significant homology to sequences in the GENBANK® database were searched manually for open reading frames and are listed in Table III.

[0245] An unsubtracted cDNA library was constructed as follows. Approximately 6400 head and nerve cords were dissected from C. felis and poly-A RNA was isolated as described above. About seven μg of HNC poly-A RNA was used to construct a cDNA library using Stratagene's λ ZAP-cDNA® Synthesis Kit and protocol. The resultant HNC library was amplified to a titer of about 5×10⁹ plaque forming units per milliliter (pfu/ml). Single clone excisions were performed using the EX-ASSIST® helper phage, available from Stratagene, and used to create double stranded plasmid template for sequencing using the manufacturer's protocols with the following exceptions. Following incubation of the SOLR cells with the cleared phage lysate, the mixture was used to inoculate LB broth, and the mix was incubated overnight and then subjected to mini-prep plasmid preparation and sequencing as described for the subtracted library above.

### Example 3

[0246] This example describes the production of a C. felis cDNA pool by Rapid Amplification of cDNA Ends (RACE cDNA pool).

[0247] Total RNA was extracted from adult fed and unfed fleas as follows. Approximately 1000 adult fed fleas and 1000 adult unfed fleas were frozen on dry ice and separately ground into powder using a mortar and pestle and total RNA was extracted from each powder as follows. Ten ml of solution D (4 M guanidine isothiocyanate, 25 mM Sodium Citrate pH 7.0, 1.5% Sarcosyl, 0.5 M 2-mercaptoethanol) were added to the powder and the suspension was mixed by shaking. One ml of 2M sodium acetate, pH 4.0 and 3 ml of pH 4.7 phenol/chloroform/isoamyl alcohol (125:24:1), available from Sigma, were added and the suspension was mixed on a vortex shaker then incubated on ice for 15 minutes. Following incubation, the mixture was centrifuged at 10,000×g for 20 minutes and the supernatant was removed and extracted twice with pH 4.7 phenol/chloroform/isoamyl alcohol. Next, an equal volume of isopropanol was added to the supernatant and incubated at −20° C. for 2 hours followed by centrifugation at 10,000×g for 20 minutes. Following centrifugation, the supernatant was removed and discarded and the pellet was washed in 70% ethanol and allowed to dry at room temperature. The pellet was resuspended in 10 mM Tris 1 mM EDTA pH 8.0. Spectrophotometer analysis indicated that the yield of total RNA from unfed fleas was 1140 μg and the yield from fed fleas was 1500 μg.

[0248] Six-hundred μg from each of the fed and unfed adult flea total RNA extractions were combined and mRNA was then extracted using a mRNA Purification Kit, available from Amersham Pharmacia Biotech, Piscataway, N.J., using the manufacture's protocol. Approximately 15-25 μg of mRNA were isolated based on spectrophotometer analysis and ethidium bromide staining. One μg of purified mRNA was used as template to construct a RACE cDNA pool using a Marathon cDNA Amplification Kit, available from Clontech Laboratories, Inc., Palo Alto, Calif., according to the manufacturers instructions.

### Example 4

[0249] This example describes the cloning, sequencing, recombinant protein expression and purification of a C. felis allantoinase nucleic acid molecule of the present invention. This example also describes the expression of allantoinase mRNA in a variety of flea tissues.

[0250] A TA clone from the HMT EST library described in Example 1 was sequenced using standard sequencing methods and shown to have significant homology to allantoinase genes. This clone was digested with EcoRI to excise an insert 682 nucleotides in length, referred to as flea nucleic acid molecule nCfALN₆₉₂. The insert was isolated by gel purification using a Gel Purification kit, available from Qiagen, Chatsworth, Calif. Approximately 50 nanograms (ng) of purified nCfALN₆₈₂ was used to construct a ³²P α-dATP labeled DNA probe using a MEGAPRIME® DNA labeling kit, available from Amersham, Arlington Heights, Ill., using the manufacturer's protocols.

[0251] The ³²P α-dATP labeled probe was used in a standard plaque lift hybridization procedure to isolate a clone from the HMT lambda-ZAP unsubtracted cDNA library described in Example 1. The following hybridization conditions were used, hereinafter referred to as “standard hybridization conditions”. Filters were hybridized with about 1×10⁶ counts per minute (cpm) per ml of the probe in 5×SSPE, (see Sambrook et al., ibid.), 1.2% sodium dodecyl sulfate (SDS), 0.1 mg/ml salmon sperm DNA and 5×Denhardt's reagent, (see Sambrook et al., ibid.), at 55° C. for about 14 hours. The filters were washed as follows: (a) 10 minutes with 5×SSPE and 1% SDS, (b) 10 minutes with 2×SSPE and 1% SDS, (c) 10 minutes with 1×SSPE and 0.5% SDS, and (d) 10 minutes with 0.5×SSPE and 1% SDS. All washes were conducted at 55° C. Plaques that hybridized strongly to the probe were isolated and subjected to in vivo excision. In vivo excision was performed using the Stratagene EX-ASSIST® helper phage system and protocols, to convert a positive plaque to PBLUESCRIPT® plasmid DNA. Sequencing was conducted using standard sequencing methods following preparation of DNA with a Qiagen QIAPREP® spin mini prep kit using the manufacturer's instructions and restriction enzyme digestion with about 1 μl of 20 U/μl each of EcoRI and XhoI, available from New England Biolabs, Beverly, Mass. A clone was isolated from a primary plaque, containing a nucleic acid molecule of about 2057 base pairs, referred to herein as nCfALN₂₀₅₇, having a nucleotide sequence denoted herein as SEQ ID NO:1. The complement of SEQ ID NO:1 is represented herein as SEQ ID NO:3. Sequencing of nCfALN₆₈₂ indicates that nCfALN₆₈₂ shared 100% identity with nucleotides 855 through 1536 of SEQ ID NO:1.

[0252] Translation of SEQ ID NO:1 suggests that nucleic acid molecule nCfALN₂₀₅₇ encodes a full-length allantoinase protein of 384 amino acids, referred to herein as PCfALN₃₈₄, having an amino acid sequence represented by SEQ ID NO:2, assuming the initiation codon spans from nucleotide 152 through nucleotide 154 of SEQ ID NO:1 and the termination codon spans from nucleotide 1304 through nucleotide 1306 of SEQ ID NO:1. The coding region encoding PCfALN₃₈₄, is represented by nucleic acid molecule nCfALN₁₁₅₂, having a coding strand with the nucleic acid sequence represented by SEQ ID NO:4 and a complementary strand with nucleic acid sequence represented by SEQ ID NO:6. The amino acid sequence of PCfALN₃₈₄, also represented as SEQ ID NO:5, predicts that PCfALN₃₈₄ has an estimated molecular weight of about 42.2 kilodaltons (kDa) and an estimated isoelectric point (pI) of about 6.

[0253] Comparison of amino acid sequence SEQ ID NO:2 with amino acid sequences reported in GENBANK® indicates that SEQ ID NO:2 showed the most homology, i.e., about 48.6% identity, with a Rana catesbeiana (bullfrog) allantoinase protein, GENBANK® Accession No. 458126. Comparison of SEQ ID NO:4 with nucleic acid sequences reported in GENBANK® indicates that SEQ ID NO:4 showed the most homology, i.e., about 51% identity, with a Rana catesbeiana nucleic acid molecule, GENBANK® Accession number U03471. Percent identity calculations were performed using GCG® version 9.0 using default parameters.

[0254] The coding region of nCfALN₂₀₅₇, i.e. SEQ ID NO:4, was PCR amplified from the PBLUESCRIPT® clone described above as the template, using sense primer ALN-FE, having nucleotide sequence 5′ GCG GAT CCT ATG CTG AAT TGC AAG AAC CTT G 3′, having a BamHI site indicated in bold, designated herein as SEQ ID NO:37, and anti-sense primer ALN-RE, having nucleotide sequence 5′ CAG GTA CCC TCT TTT AGA AGC ACC GGT CCC 3′, having a KpnI site indicated in bold, designated herein as SEQ ID NO:38. PCR reactions were performed using the following amplification cycles: (a) one cycle at 95° C. for thirty seconds; (b) thirty cycles at 95° C. for twenty seconds, 50° C. for twenty seconds, and 72° C. for two minutes; and (c) one cycle at 72° C. for five minutes, hereinafter referred to as “standard thermocycling conditions”, in reactions containing 2.5 mM MgCl₂, 0.2 mM dNTPs, 1 μM of each primer, 0.5 μl of 5 U/μl Taq polymerase, 1 μl of 1 μg/μl template, and 3 μl of 10× Taq buffer, hereinafter referred to as “standard PCR reaction conditions”. The PCR product was digested with BamHI and KpnI and ligated into the vector pTrcHisB, available from Invitrogen, that had been digested with BamHI and KpnI and treated with alkaline phosphatase. The resulting recombinant molecule, referred to herein as pTrc-nCfALN₁₁₅₂, was transformed into E. coli strain BL21, available from Novagen Inc., Madison, Wis., to form recombinant cell E. coli:pTrc-nCfALN₁₁₅₂.

[0255] The recombinant cell was grown under standard conditions and then incubated in the presence of 0.5 μM isopropylthio-β-galactoside (IPTG) to induce expression of recombinant protein, predicted to be approximately 42.2 kDa. Expression was confirmed using Coomassie-blue-stained Tris-glycine gel and by Western blot using a T7 tag antibody, available from Novagen, which showed expression of an about 55-kDa protein. The protein product was purified by liquid chromatography using a HITRAP® chelating column charged with NiCl₂, available from Pharmacia, and was shown to contain the His tag of the vector when subjected to automated protein sequencing by Edman degradation.

[0256] A Northern Blot analysis was conducted as follows to determine whether allantoinase is expressed exclusively in HMT tissues. HMT tissues were dissected from 1000 adult cat blood-fed C. felis having a male to female ratio of 1:4. Total RNA was separately extracted from HMT tissues and the HMT-less carcasses that resulted from these dissections as follows. The tissues were frozen at −80° C., ground into a powder with a mortar and pestle, and the powders were equally divided into four 2-ml eppendorf tubes each containing 1 ml of lysis buffer. The lysis buffer contained 4 M guanidinium thiocyanate, 25 mM sodium citrate, pH 7.0, 3% sarcosyl, 0.5M 2-mercaptoethanol, 0.1% antifoam, and 1 mM aurintricarboxylic acid, all available from Sigma Chemical Corporation, St. Louis, Mo. After mixing, the tubes were spun at 14,000 rpm for 2 minutes and the supernatants were transferred to separate 2 ml eppendorf tubes containing 250 μl of phenol, available from Aldrich, Milwaukee, Wis. After mixing, the tubes were spun at 14,000 rpm for 5 minutes and the supernatants were transferred to new 2-ml tubes. This process was repeated 3 times until no proteinaceous matter was visible at the phenol/lysis buffer interface, then 250 μl of chloroform was added to each tube and the contents mixed and spun at 14,000 rpm for 5 minutes followed by transferring the supernatant to a new tube. A volume of isopropanol equal to the volume of the supernatant was added to each tube and the tubes placed on ice for 5 minutes. The tubes were then spun at 14,000 rpm at room temperature for 15 minutes, the supernatants were removed and discarded and the remaining RNA pellets were washed with 70% ethanol and dried. The RNA pellets were resuspended in 100 μl of TE (10 mM Tris, 1 mM ethylenediaminetetraacetic acid (EDTA)). The quantity of RNA in each tube was then determined using a spectrophotometer.

[0257] Approximately 10 μg of each RNA was added to separate tubes containing 18.75 μl of loading buffer, which consists of 50% formamide, 16% formaldehyde, 17% water, 7% glycerol, 1×MOPS buffer (a 1:20 dilution of 0.4 M 93-[N-morpholino]propanesulfonic acid (MOPS), 0.1 M sodium acetate, and 20 mM EDTA), 10 μl ethidium bromide, and 10 μl bromophenol blue dye, all available from Sigma. The tubes were heated to 95° C. for 2 minutes then placed on ice. The RNA samples were separated by gel electrophoresis on a 1.5% agarose gel with 3.2% formaldehyde and 1×MOPS buffer; the gel was then soaked in water for 30 minutes prior to transfer to remove excess formaldehyde. The gel was then transferred using standard techniques, described by Sambrook et al., ibid, with 10×SSPE as the transfer buffer onto NYTRAN® nylon membrane, available from Schleicher and Schuell Inc., Keene, N. H. The membrane was UV cross-linked using the STRATALINKER®, available from Stratagene, then prehybridized at 42° C. in 50% formamide, 5×SSPE, 1.2% SDS, 5×Denhardt's reagent, 2.5 mM EDTA, and 100 μg/ml salmon sperm DNA. A probe comprising the allantoinase EST nucleic acid molecule, nCfALN₆₈₂ was labeled with α-³²P-ATP using a DNA labeling kit, available from Amersham and added to the buffer at a concentration of approximately 1×10⁶ cpm/ml, and allowed to hybridize for 18 hours at 42° C. The blot was then washed as follows: 10 minutes at 42° C. in 4×SSPE and 1% SDS; 10 minutes at 42° C. in 2×SSPE and 1% SDS; 10 minutes at 42° C. with 0.5×SSPE and 0.5×SDS; and 10 minutes at 42° C. with 0.25×SSPE and 0.25% SDS. The blot was then exposed to film for 1 hour, and the film was developed using standard procedures. Analysis of the developed film revealed that allantoinase mRNA was present in HMT tissues but was not present in non-HMT tissues.

[0258] Northern Blot analysis was also conducted to determine whether allantoinase mRNA is expressed only in certain stages of the flea life cycle and whether allantoinase mRNA expression is influenced by feeding. Total RNA was extracted as described above from 1000 fleas at each of the following flea life stages; eggs, first instar larvae, third instar larvae, wandering larvae and pupae and from 1000 adult fleas under the following feeding conditions; unfed, fed on cat blood for 15 minutes, fed on cat blood for 2 hours, fed on cat blood for 8 hours, and fed on cat blood for 24 hours.

[0259] Each RNA sample was separated by gel electrophoresis, transferred to nylon membrane and hybridized with α-³²P-ATP labeled nCfALN₆₈₂ probe as described above. Analysis of the developed film revealed that allantoinase mRNA was expressed in all adult fleas tested regardless of feeding conditions and was expressed by all life stages except for eggs and pupae, the two life stages which do not feed or excrete urine.

### Example 5

[0260] This example describes the cloning, sequencing, recombinant protein expression and purification of a C. felis chitin-binding protein nucleic acid molecule. This example also describes the expression of chitin-binding protein mRNA in a variety of flea tissues.

[0261] A TA clone from the HMT EST library described in Example 1 was sequenced using standard sequencing methods and shown to have homology to a chitinase-like gene from Bombyx mori (silkworm). This clone was digested with EcoRI to excise an insert about 429 nucleotides in length, referred to as chitin-binding protein (CBP) nucleic acid molecule nCfCBP₄₂₉. The insert was isolated by gel purification using a Gel Purification kit, available from Qiagen. Approximately 50 ng of purified nCfCBP₄₂₉ was used to construct a ³²P α-dATP labeled DNA probe using a MEGAPRIME® DNA labeling kit, available from Amersham, using the manufacturer's protocols.

[0262] The ³²P α-dATP labeled probe was used in a plaque lift hybridization procedure to isolate a clone from the HMT lambda-ZAP unsubtracted cDNA library described in Example 1, using standard hybridization conditions described in Example 4. Plaques that hybridized strongly to the probe were isolated and subjected to in vivo excision. In vivo excision was performed using the Stratagene EX-ASSIST® helper phage system and protocols, to convert a positive plaque to PBLUESCRIPT® plasmid DNA, and sequencing was conducted following preparation of DNA with a Qiagen QIAPREP® spin mini prep kit using the manufacturer's instructions and restriction enzyme digestion with about 1 μl of 20 U/μl each of EcoRI and XhoI, available from New England Biolabs. A clone was isolated from a primary plaque, containing a nucleic acid molecule of about 1128 base pairs, referred to herein as nCfCBP₁₁₂₈, having a nucleotide sequence denoted herein as SEQ ID NO:7. The complement of SEQ ID NO:7 is represented herein as SEQ ID NO:9. Sequencing of nCfCBP₄₂₉ indicated that nCfCBP₄₂₉ shares 100% identity with nucleotides 148 through 576 of SEQ ID NO:7.

[0263] Translation of SEQ ID NO:7 suggests that nucleic acid molecule nCfCBP₁₁₂₈ encodes a full-length chitin-binding protein of 272 amino acids, referred to herein as PCfCfCBP₂₇₂, having an amino acid sequence represented by SEQ ID NO:8, assuming the initiation codon spans from nucleotide 6 through nucleotide 8 of SEQ ID NO:7 and the termination codon spans from nucleotide 822 through nucleotide 824 of SEQ ID NO:7. The coding region encoding PCfCBP₂₇₂, is represented by nucleic acid molecule nCfCBP₈₁₆, having a coding strand with the nucleic acid sequence represented by SEQ ID NO:10 and a complementary strand with nucleic acid sequence represented by SEQ ID NO:12. The amino acid sequence of PCfCBP₂₇₂, also represented as SEQ ID NO:11, predicts that PCfCBP₂₇₂ has an estimated molecular weight of about 30.6 kDa and an estimated pI of about 7.3.

[0264] Comparison of amino acid sequence SEQ ID NO:8 with amino acid sequences reported in GENBANK® indicates that SEQ ID NO:8 showed the most homology, i.e., about 26% identity with a Lucilia cuprina peritrophin-44 protein, GENBANK® Accession No. 407976. Comparison of SEQ ID NO:10 with nucleic acid sequences reported in GENBANK® indicates that SEQ ID NO:10 showed the most homology, i.e., about 40% with a Lucilia cuprina peritrophin-44 nucleic acid molecule, GENBANK® Accession number L25106. Percent identity calculations were performed using GCG® version 9.0 using default parameters.

[0265] A nucleic acid molecule comprising nucleotides 59 through 827 of SEQ ID NO:7, encoding a predicted mature flea chitin-binding protein, was PCR amplified from the PBLUESCRIPT® clone described above as the template, using sense primer CBP-FE, having nucleotide sequence 5′ CGG GAT CCT GCT GAC AGG AAT TCG CCC AC 3′, having a BamHI site indicated in bold, designated herein as SEQ ID NO:51, and anti-sense primer CBP-RE, having nucleotide sequence 5′ CAT GGT ACC CCT GGT TTA AGC CTT ACT TAG C 3′, having a KpnI site indicated in bold, designated herein as SEQ ID NO:52. PCR reactions were performed using standard PCR reaction and thermocycling conditions described in Example 4. The PCR product was digested with BamHI and KpnI and ligated into the vector pTrcHisB, available from Invitrogen, that had been digested with BamHI and KpnI and treated with alkaline phosphatase. The resulting recombinant molecule, referred to herein as pTrc-nCfCBP₇₆₉, was transformed into E. coli strain BL21, available from Novagen, to form recombinant cell E. coli:pTrc-nCfCBP₇₆₉. The recombinant cell was grown under standard conditions and then incubated in the presence of 0.5 μM IPTG to induce expression of recombinant protein, predicted to be a protein of approximately 32 kDa. Expression of protein was confirmed using Coomassie-blue-stained Tris-glycine gel and by Western blot using a T7 tag antibody which showed expression of an about 32-kDa protein. The protein product was purified by liquid chromatography using a HITRAP® chelating column charged with NiCl₂, available from Pharmacia, and was shown to contain the His tag of the vector when subjected to automated protein sequencing by Edman degradation.

[0266] Northern Blot analysis was conducted as described in Example 4 to determine whether CBP mRNA is expressed in only HMT tissue, only in certain stages of the flea life cycle and whether CBP mRNA expression is influenced by feeding. Total RNA was extracted from flea tissues, life stages and feeding conditions as described in Example 4. Each RNA sample was separated by gel electrophoresis, transferred to a nylon membrane and hybridized with α-³²P-ATP labeled nCfCBP₄₂₉ under the Northern Blotting conditions described in Example 4. Analysis of the developed film revealed that CBP mRNA was expressed in HMT tissues but not in non-HMT tissues. CBP mRNA was also detected in all adult fleas tested regardless of feeding conditions but was not detected in any of the non-adult life stages.

### Example 6

[0267] This example describes the cloning and sequencing of a C. felis sodium/potassium ATPase, beta subunit nucleic acid molecule.

[0268] A TA clone from the HMT EST library described in Example 1 was sequenced using standard sequencing methods and shown to have homology to the nervous system antigen 1 gene from Drosophila melanogaster. This clone was digested with EcoRI to excise an insert about 439 nucleotides in length, referred to as flea NKB nucleic acid molecule nCfNKAB₄₃₉. The insert was isolated by gel purification using a Gel Purification kit, available from Qiagen. Approximately 50 ng of purified nCfNKAB₄₃₉ was used to construct a ³²P α-dATP labeled DNA probe using a MEGAPRIME® DNA labeling kit, available from Amersham, using the manufacturer's protocols.

[0269] The ³²P α-dATP labeled probe was used in a plaque lift hybridization procedure to isolate a clone from the HMT lambda-ZAP unsubtracted cDNA library described in Example 1, using standard hybridization conditions described in Example 4. Plaques that hybridized strongly to the probe were isolated and subjected to in vivo excision. In vivo excision was performed using the Stratagene EX-ASSIST® helper phage system and protocols, to convert a positive plaque to PBLUESCRIPT® plasmid DNA, and sequencing was conducted following preparation of DNA with a Qiagen QIAPREP® spin mini prep kit using the manufacturer's instructions and restriction enzyme digestion with about 1 μl of 20 U/μl each of EcoRI and XhoI, available from New England Biolabs. A clone was isolated from a secondary plaque, containing a nucleic acid molecule of about 1714 base pairs, referred to herein as nCfNKAB₁₇₁₄, having a nucleotide sequence denoted herein as SEQ ID NO:13. The complement of SEQ ID NO:13 is represented herein as SEQ ID NO:15. Sequencing of nCfNKAB₄₃₉ indicates that nCfNKAB₄₃₉ shared 100% identity with nucleotides 907 through 1345 of SEQ ID NO:13.

[0270] Translation of SEQ ID NO:13 suggests that nucleic acid molecule nCfNKAB₁₇₁₄ encodes a full-length NKAB protein of 326 amino acids, referred to herein as PCfNKAB₃₂₆, having an amino acid sequence represented by SEQ ID NO:14, assuming the initiation codon spans from nucleotide 294 through nucleotide 296 of SEQ ID NO:13 and the termination codon spans from nucleotide 1272 through nucleotide 1274 of SEQ ID NO:13. The coding region encoding PCfNKAB₃₂₆ is represented by nucleic acid molecule nCfNKAB₉₇₈, having a coding strand with the nucleic acid sequence represented by SEQ ID NO:16 and a complementary strand with nucleic acid sequence represented by SEQ ID NO:18. The amino acid sequence of PCfNKAB₃₂₆, also represented by SEQ ID NO:17 predicts that PCfNKAB₃₂₆ has an estimated molecular weight of about 37.7 kDa and an estimated pI of about 5.

[0271] Comparison of amino acid sequence SEQ ID NO:14 with amino acid sequences reported in GENBANK® indicates that SEQ ID NO:14 showed the most homology, i.e., about 46% identity, with a Drosophila melanogaster nervous system antigen 2 protein, GENBANK® Accession No. 881344. Comparison of SEQ ID NO:16 with nucleic acid sequences reported in GENBANK® indicates that SEQ ID NO:16 showed the most homology, i.e., about 52% identity, with a Drosophila melanogaster nervous system antigen 2 nucleic acid molecule, GENBANK® Accession number U22440. Percent identity calculations were performed using GCG® version 9.0 using default parameters.

### Example 7

[0272] This example describes the cloning and sequencing of a C. felis ligand-gated ion channel nucleic acid molecule. This example also describes the expression of ligand-gated ion channel mRNA in a variety of flea tissues.

[0273] A TA clone from the HMT EST library described in Example 1 was sequenced using standard sequencing methods and shown to have homology to a human ligand-gated chloride channel nucleic acid molecule. The clone was digested with EcoRI to excise an insert about 376 nucleotides in length, referred to as flea LGIC nucleic acid molecule nCfLGIC₃₇₆. The insert was isolated by gel purification using a Gel Purification kit, available from Qiagen. Approximately 50 ng of purified nCfLGIC₃₇₆ was used to construct a ³²P α-dATP labeled DNA probe using a MEGAPRIME® DNA labeling kit available from Amersham, using the manufacturer's protocols.

[0274] The ³²P α-dATP labeled probe was used in a plaque lift hybridization procedure to isolate a clone from the HMT lambda-ZAP unsubtracted cDNA library described in Example 1, using standard hybridization conditions described in Example 4. Plaques that hybridized strongly to the probe were isolated and subjected to in vivo excision. In vivo excision was performed using the Stratagene EX-ASSIST® helper phage system and protocols, to convert a positive plaque to PBLUESCRIPT® plasmid DNA and sequencing was conducted following preparation of DNA with a Qiagen QIAPREP® spin mini prep kit using the manufacturer's instructions and restriction enzyme digestion with about 1 μl of 20 U/μl each of EcoRI and XhoI, available from New England Biolabs. A clone was isolated from a secondary plaque, containing a nucleic acid molecule of about 2240 base pairs, referred to herein as n nCfLGIC₂₂₄₀, having a nucleotide sequence denoted herein as SEQ ID NO:19. The complement of SEQ ID NO:19 is represented herein as SEQ ID NO:21. Sequencing of nCfLGIC₃₇₆ indicates that nCfLGIC₃₇₆ shared 100% identity with nucleotides 763 through 1138 of SEQ ID NO:19.

[0275] Translation of SEQ ID NO:19 suggests that nucleic acid molecule nCfLGIC₂₂, encodes a partial-length LGIC protein of 569 amino acids, referred to herein as PCfLGIC₅₆₉, having an amino acid sequence represented by SEQ ID NO:20, assuming the initiation codon spans from nucleotide 1 through nucleotide 3 of SEQ ID NO:19 and the termination codon spans from nucleotide 1708 through nucleotide 1710 of SEQ ID NO:19. The coding region encoding PCfLGIC₅₆₉, is represented by nucleic acid molecule nCfLGIC₁₇₀₇, having a coding strand with the nucleic acid sequence represented by SEQ ID NO:22 and a complementary strand with nucleic acid sequence represented by SEQ ID NO:24. The amino acid sequence of PCfLGIC₅₆₉, also represented as SEQ ID NO:23, predicts that PCfLGIC₅₆₉ has an estimated molecular weight of about 64 kDa and an estimated pI of about 6.6.

[0276] Comparison of amino acid sequence SEQ ID NO:20 with amino acid sequences reported in GENBANK® indicates that SEQ ID NO:20 showed the most homology, i.e., about 23% identity, with a Rattus norvegicus glycine receptor alpha-3 chain precursor protein, GENBANK® Accession No. 121580. Comparison of SEQ ID NO:22 with nucleic acid sequences reported in GENBANK® indicates that SEQ ID NO:22 showed the most homology, i.e., about 38% identity, with a human glycine receptor alpha-3 subunit nucleic acid molecule, GENBANK® Accession number AF017715. Percent identity calculations were performed using GCG® version 9.0 using default parameters.

[0277] Northern Blot analysis was conducted as described in Example 4 to determine whether LGIC mRNA is expressed in only HMT tissue. Total RNA was extracted from HMT tissues and non-HMT tissues as described in Example 4. Each RNA sample was separated by gel electrophoresis, transferred to nylon membranes and hybridized with α-³²P-ATP labeled nCfLGIC₃₇₆ under the Northern Blotting conditions described in Example 4. Analysis of the developed film revealed that LGIC mRNA was expressed in HMT tissues but not in non-HMT tissues.

[0278] Additional nucleic acid sequence corresponding to the coding regions at the 5′ end of the LGIC cDNA described above was isolated by PCR using the RACE cDNA pool prepared as described in Example 3 as the template. A first PCR reaction was conducted using reverse primer LGIC-R4, which is complementary to nucleotides 200-223 of SEQ ID NO:19, having a nucleic acid sequence 5′ GCG ATA CTG GTG GTA CTG GTG AAG 3′, denoted herein as SEQ ID NO:1932 was used with the forward linker primer Adapter Primer 1, having a nucleic acid sequence 5′ CCA TCC TAA TAC GAC TCA CTA TAG GGC 3′, denoted herein as SEQ ID NO:1933 using standard PCR reaction conditions and the following thermocycling conditions: (1) 94° C. for 30 seconds, (2) 5 cycles of 94° C. for 10 seconds then 72° C. for 4 minutes, (3) 5 cycles of 94° C. for 10 seconds then 70° C. for 4 minutes, and (4) 25 cycles of 94° C. for 10 seconds then 68° C. for 4 minutes. The reaction product was separated on a 1.5% agarose gel and stained by ethidium bromide, but no clear bands were seen. The first PCR reaction product was diluted 1:50 in water and used as template for a second PCR reaction using reverse primer LGIC-R5, which is complementary to nucleotides 88-110 of SEQ ID NO:19, having a nucleic acid sequence 5′ GAG GTG GTT GTC TTC AGT GGT TG 3′, denoted herein as SEQ ID NO:1934 and forward Adapter Primer 2, having a nucleic acid sequence 5′ ACT CAC TAT AGG GCT CGA GCG GC 3′, denoted herein as SEQ ID NO:1935 under the same reaction conditions described for the first PCR reaction. The reaction product was separated by electrophoresis on a 1.5% agarose gel and stained with ethidium bromide revealing an approximately 700 bp band. This band was cut from the gel and purified using the QIAQUICK® Gel Extraction Kit, then ligated into the pCR II TA CLONING® vector, available from Invitrogen Corporation, Carlsbad, Calif., using the manufacture's protocol. This clone, referred to herein as nCfLGIC₆₁₃ and having a coding sequence denoted SEQ ID NO:1859, and a complementary strand denoted herein as SEQ ID NO:1860 was sequenced using an ABI PRISM® 377 automatic DNA Sequencer, available from Perkin Elmer, Branchburg, N.J. Sequence analysis revealed that nucleotides 503-613 of nCfLGIC₆₋₃ had 100% identity with nucleotides 1-110 of SEQ ID NO:19. The two sequences were aligned to form a 2739 nucleotide contiguous sequence, referred to herein as nCfLGIC₂₇₃₉, having a coding strand denoted herein as SEQ ID NO:1861 and a complementary strand denoted herein as SEQ ID NO:1863. Translation of SEQ ID NO:1861 suggests that nucleic acid molecule nCfLGIC₂₇₃₉ encodes a full-length LCIC protein of 672 amino acids, referred to herein as PCfLGIC₆₇₂, having an amino acid sequence represented by SEQ ID NO:1862, assuming the initiation codon spans from nucleotide 191 through nucleotide 193 of SEQ ID NO:1861 and the termination codon spans from nucleotide 2207 through nucleotide 2209 of SEQ ID NO:1861. The coding region encoding PCfLGIC₆₇₂, is represented by nucleic acid molecule nCfLGIC₂₀₁₆, having a coding strand with the nucleic acid sequence represented by SEQ ID NO:1864 and a complementary strand with nucleic acid sequence represented by SEQ ID NO:1866. The amino acid sequence of PCfLGIC₆₇₂, i.e. SEQ ID NO:1862, predicts that PCfLGIC₆₇₂ has an estimated molecular weight of about 75.5 kDa and an estimated pI of about 5.89.

[0279] Comparison of amino acid sequence SEQ ID NO:1862 with amino acid sequences reported in GENBANK® indicates that SEQ ID NO:1862 showed the most homology, i.e., 31.4% identity with glycine receptor Alpha 3 chain precursor cDNA from Rattus norvegicus (Accession # P24524). Comparison of SEQ ID NO:1864 with nucleic acid sequences reported in GENBANK® indicates that SEQ ID NO:1864 showed the most homology, i.e., about 43.1% identity with the Homo sapiens glycine receptor, alpha3 cDNA (Accession # NP006520). Percent identity calculations were performed using GCG® version 9.0 using default parameters.

[0280] A LGIC nucleic acid molecule for recombinant expression of the predicted extracellular domain was produced as follows. In order to ligate the region encoding the predicted extracellular domain of the LGIC cDNA into the INSECTSELECT™ expression vector pIB/V5-His, two separate but overlapping DNA fragments were generated to be used as the template in the PCR overlap extension. To generate a 3′ DNA fragment, a first PCR reaction was conducted using forward primer LGIC-ECD-D2F, which corresponds to nucleotides 2-25 of SEQ ID NO:19, having a nucleic acid sequence 5′ CAA TTT TAA ACG CAT CCA CGA CCG 39, denoted herein as SEQ ID NO:1936, and reverse primer LGIC-ECD-RE, which is complementary to nucleotides 937-961 of SEQ ID NO:19, having a nucleic acid sequence 5′ CCG CTC GAG CGA CCC ATT TCA CGA CTT ATT TGA ATC G 3′, denoted herein as SEQ ID NO:1937 and having a XhoI site indicated in bold, to amplify nucleotides 2-963 from SEQ ID NO:19 which was used as template under standard PCR reaction conditions and the following thermocycling conditions: (1) 94° C. for 30 seconds, (2) 25 cycles of 94° C. for 10 seconds, 55° C. for 10 seconds, and 72° C. for 3 minutes. The products of this reaction were separated on a 1.5% agarose gel, and a band corresponding to an approximately 960 nucleotide molecule was cut from the gel and purified using the QIAQUICK® Gel Extraction Kit as described above. To generate a 5′ cDNA fragment, a second PCR reaction was conducted using reverse primer LGIC-R5 (SEQ ID NO:1934) and forward primer LGIC-ECD-FE, which corresponds to nucleotides 188-215 of SEQ ID NO:1859, having a nucleic acid sequence 5′ GGA ATT CTA AAA TGC ACA ACA AAA TCC TGG TCC TGG 3′, denoted herein as SEQ ID NO:1938, and having an EcoRI site indicated in bold, using SEQ ID NO:1859 as the template under the thermocycling conditions described for generating the 3′ fragment. The products of this reaction were separated on a 1.5% agarose gel, and a band corresponding to an approximately 425 nucleotide molecule was cut from the gel and purified using the QIAQUICK® Gel Extraction Kit as described above.

[0281] For the PCR overlap extension reaction, the 5′ and 3′ cDNA fragments described above were used as the template in a PCR reaction with forward primer LGIC-ECD-FE and reverse primer LGIC-ECD-RE under the thermocycling conditions described for generating the 5′ and 3′ fragments. The products of this reaction were separated on a 1.5% agarose gel, and a band corresponding to an approximately 1300 nucleotide molecule, as visualized by agarose gel electrophoresis and ethidium bromide staining, referred to herein as nCfLGIC₁₃₀₀, was cut from the gel and purified using the QIAQUICK® Gel Extraction Kit as described above.

[0282] The product of the PCR overlap extension reaction was the digested with EcoRI and XhoI restriction endonucleases, available from New England BioLabs, Inc., Beverly, Mass., for 18 hours at 37′. The digestion product was purified using the QIAQUICK® Nucleotide Removal Kit, available from Qiagen, and ligated into the vector pIB/V5-His which had also been digested with EcoRI and XhoI and treated with shrimp alkaline phosphatase, available from New England BioLabs, Inc. for 30 minutes at 37°. Following standard transformation procedures, a bacterial clone containing the plasmid pIB/V5-His-nCfLGIC₁₃, was isolated. DNA sequence analysis of pIB/V5-His-nCfLGIC₁₃₀₀ confirmed that nucleotides 188-1464 of SEQ ID NO:1861 had been successfully ligated into the pIB/V5-His expression vector in frame with the C-terminal V5 epitope encoded by the vector.

### Example 8

[0283] This example describes the cloning and sequencing of a C. felis ANON/23DA nucleic acid molecule. This example also describes the expression of ANON/23DA mRNA in a variety of flea tissues.

[0284] A TA clone from the HMT EST library described in Example 1 was sequenced using standard sequencing methods and shown to have homology to an ANON/23DA gene from Drosophila melanogaster. This clone was digested with EcoRI to excise an insert about 177 nucleotides in length, referred to as flea ANON nucleic acid molecule nCfANON₁₇₇. The insert was isolated by gel purification using a Gel Purification kit, available from Qiagen. Approximately 50 ng of purified nCfANON₁₇₇ was used to construct a ³²P α-dATP labeled DNA probe using a MEGAPRIME® DNA labeling kit, available from Amersham, using the manufacturer's protocols.

[0285] The ³²P α-dATP labeled probe was used in a plaque lift hybridization procedure to isolate a clone from the HMT lambda-ZAP unsubtracted cDNA library described in Example 1, using standard hybridization conditions described in Example 4. Plaques that hybridized strongly to the probe were isolated and subjected to in vivo excision. In vivo excision was performed using the Stratagene EX-ASSIST® helper phage system and protocols, to convert a positive plaque to PBLUESCRIPT® plasmid DNA and sequencing of DNA was conducted following preparation with a Qiagen QIAPREP® spin mini prep kit using the manufacturer's instructions and restriction enzyme digestion with about 1 III of 20 U/μl each of EcoRI and XhoI, available from New England Biolabs. A clone was isolated from a secondary plaque, containing a nucleic acid molecule of about 1429 base pairs, referred to herein as nCfANON₁₄₂₉, having a nucleotide sequence denoted herein as SEQ ID NO:25. The complement of SEQ ID NO:25 is represented herein as SEQ ID NO:27. Sequencing of nCfANON₁₇₇ indicates that nCfANON₁₇₇ shared 100% identity with nucleotides 279 through 455 of SEQ ID NO:25.

[0286] Translation of SEQ ID NO:25 suggests that nucleic acid molecule nCfANON₁₄₂₉ encodes a full-length ANON protein of 398 amino acids, referred to herein as PCfANON₃₉₈, having an amino acid sequence represented by SEQ ID NO:26, assuming the initiation codon spans from nucleotide 18 through nucleotide 20 of SEQ ID NO:25 and the termination codon spans from nucleotide 1212 through nucleotide 1214 of SEQ ID NO:25. The coding region encoding PCfANON₃₉₈, is represented by nucleic acid molecule nCfANON₁₁₉₄, having a coding strand with the nucleic acid sequence represented by SEQ ID NO:28 and a complementary strand with nucleic acid sequence represented by SEQ ID NO:30. The amino acid sequence of PCfANON₃₉₈, also represented as SEQ ID NO:29, predicts that PCfANON₃₉₈ has an estimated molecular weight of about 45 kDa and an estimated pI of about 8.8.

[0287] Comparison of amino acid sequence SEQ ID NO:26 with amino acid sequences reported in GENBANK® indicates that SEQ ID NO:26 showed the most homology, i.e., about 65% identity, with a Drosophila melanogaster ANON/23DA protein, GENBANK® Accession No. 924937. Comparison of SEQ ID NO:28 with nucleic acid sequences reported in GENBANK® indicates that SEQ ID NO:28 showed the most homology, i.e., about 60% identity, with a Drosophila melanogaster ANON/23DA nucleic acid molecule, GENBANK® Accession number U29170. Percent identity calculations were performed using GCG® version 9.0 using default parameters.

[0288] Northern Blot analysis was conducted as described in Example 4 to determine whether ANON mRNA is expressed in only HMT tissue, only in certain stages of the flea life cycle and whether ANON mRNA expression is influenced by feeding. Total RNA was extracted from flea tissues, life stages and feeding conditions as described in Example 4. Each RNA sample was separated by gel electrophoresis, transferred to nylon membranes and hybridized with α-³²P-ATP labeled nCfANON₁₇₇ under the Northern Blotting conditions described in Example 4. Analysis of the developed film revealed that ANON mRNA was expressed in non-HMT tissues but not in HMT tissues. ANON mRNA was also detected in all adult fleas tested regardless of feeding conditions and in the wandering larvae and pupal life stages.

### Example 9

[0289] This example describes the cloning and sequencing of a C. felis malvolio nucleic acid molecule.

[0290] A TA clone from the HMT EST library described in Example 1 was digested with EcoRI to excise an insert about 432 nucleotides in length, referred to as nCfMALV₄₃₂. The insert was isolated by gel purification using a Gel Purification kit, available from Qiagen and sequenced using standard sequencing methods and shown to have homology to a malvolio gene from Drosophila melanogaster, hereinafter referred to as a flea MALV nucleic acid molecule.

[0291] Sequence information from nCfMALV₄₃₂ was used to design PCR primers to amplify a C. felis MALV nucleic acid molecule from the HMT unsubtracted library described in Example 1 using a nested PCR as follows. Sense primer MALV R1, having the nucleotide sequence 5′ CCA TTA TTA ACC TGG TCG ACC AC 3′, designated SEQ ID NO:41 and corresponding to nucleotides 365-387 of nCfMALV₄₃₂ and reverse primer M13 Reverse, having the nucleotide sequence 5′ GGA AAC AGT ATO ACC ATG 3′, designated SEQ ID NO:42 were used in a first PCR reaction using HMT unsubtracted library as the template using standard PCR reaction and thermocycling conditions, with the exception that 2 μl of template was used. The reaction product from the first PCR reaction was diluted 1:50 and used as the template in a second PCR reaction as follows. Reverse primer malvolio R2, having a nucleotide sequence 5′ CGC TAT AGT CGG TAG GGT CGC 3′, designated SEQ ID NO:43 and corresponding to nucleotides 239-259 of nCfMALV₄₃₂ and forward primer T3, having a nucleotide sequence 5′ AAT TAA CCC TCA CTA AAG GG 3′ were used in a second PCR reaction under standard PCR reaction and thermocycling conditions.

[0292] The second PCR reaction resulted in an approximately 1000 bp PCR product which was separated by electrophoresis on a 1.5% agarose gel, excised and purified using a Gel Purification Kit, available from Qiagen. The purified PCR product was ligated into the pCRII, Original TA CLONING® vector, available from Invitrogen. The ligation reaction was then used to transform INVαF′ ONE SHOT® competent cells, available from Invitrogen, which were plated on LB agar with 50 micrograms per milliliter (μg/ml) ampicillin, available from Sigma-Aldrich Co., and 50 μg/ml X-Gal, available from Fisher Biotech. A clone was isolated from the ligation mix containing a nucleic acid molecule of about 765 base pairs, referred to herein as nCfMALV₇₆₅, having a nucleotide sequence denoted herein as SEQ ID NO:31. The complement of SEQ ID NO:31 is represented herein as SEQ ID NO:33.

[0293] Translation of SEQ ID NO:31 suggests that nucleic acid molecule nCfMALV₇₆, encodes a partial-length MALV protein of 254 amino acids, referred to herein as PCfMALV₂₅₄, having an amino acid sequence represented by SEQ ID NO:32, assuming the initiation codon spans from nucleotide 2 through nucleotide 4 of SEQ ID NO:31 and the last codon spans from nucleotide 761 through nucleotide 763 of SEQ ID NO:31. The coding region encoding PCfMALV₂₅₄, is represented by nucleic acid molecule nCfMALV₇₆₂, having a coding strand with the nucleic acid sequence represented by SEQ ID NO:34 and a complementary strand with nucleic acid sequence represented by SEQ ID NO:36. The amino acid sequence of PCfMALV₂₅₄, also represented as SEQ ID NO:35, predicts that PCfMALV₂₅₄ has an estimated molecular weight of about 36 kDa and an estimated pI of about 4.9.

[0294] Comparison of amino acid sequence SEQ ID NO:32 with amino acid sequences reported in GENBANK® indicates that SEQ ID NO:32 showed the most homology, i.e., about 71% identity, with a Drosophila melanogaster malvolio protein, GENBANK® Accession No. 780776. Comparison of SEQ ID NO:34 with nucleic acid sequences reported in GENBANK® indicates that SEQ ID NO:34 showed the most homology, i.e., about 63% identity, with a Drosophila melanogaster malvolio nucleic acid molecule, GENBANK® Accession number U23948. Percent identity calculations were performed using GCG® version 9.0 using default parameters.

### Example 10

[0295] This example describes the cloning, sequencing, and recombinant expression of a C. felis odorant-binding protein-like (OS-D) nucleic acid molecule. This example also describes the expression of OS-D mRNA in a variety of flea tissues.

[0296] A C. felis OS-D nucleic acid molecule of about 311 nucleotides was isolated from a cat blood-fed adult flea cDNA library, prepared as described in example 8 of PCT publication WO 96/11706 by Grieve et al., published Apr. 25, 1996, by PCR amplification as follows. Sense primer 5′newBsaI5′, having a nucleotide sequence 5′ CAA AAC TGG TCT CCC CGC TC 3′, denoted SEQ ID NO:57 was used in combination with vector primer T7, having a nucleic acid sequence 5′ TAA TAC GAC TCA CTA TAG GG 3′, denoted SEQ ID NO:58, in a first PCR reaction using the cat blood-fed adult flea cDNA library as the template under standard PCR reaction and thermocycling conditions. A 311-nucleotide fragment, denoted nCfOSD₃₁₁ was isolated and shown to encode a partial length protein of 45 amino acids having a sequence similar to Drosophila melanogaster OS-D protein. Since primer 5′newBsaI5′ was designed to be specific for the C. felis serpin constant region, nCfOSD₃₁₁ is believed to have been fortuitously amplified in this PCR reaction.

[0297] To isolate a flea OS-D nucleic acid molecule encoding a full-length OS-D protein, nucleic acid molecule nCfOSD₃₁₁ was used to design primers for a nested PCR as follows. Sense primer OSD-R1, having a nucleotide sequence 5′ GGT TCG CCT CTC TTC ACT TO 39, which is complementary in sequence to nucleotides 108-127 of nCfOSD₃₁₁, denoted SEQ ID NO:59, was used in combination with M13 reverse primer, SEQ ID NO:54, in a first PCR reaction using the cat blood-fed adult C. felis cDNA library as the template. The product of the first reaction was diluted 1:50 and used as the template for a second PCR reaction using reverse primer OSD-R2, having a nucleotide sequence 5′ CGG TTG GAT CGT AAA CTG CAG 3′, which is complementary in sequence to nucleotides 52-72 of nCfOSD₃₁₁, denoted SEQ ID NO:60, and forward primer T3, SEQ ID NO:56. Each PCR reaction was conducted under standard PCR reaction and thermocycling conditions with the exception that an annealing temperature of 55° C. was used rather than 50° C.

[0298] A DNA fragment of about 365 nucleotides, referred to herein as nCfOSD₃₆₅, was isolated from the second PCR product and purified using a Gel Purification Kit, available from Qiagen. The purified fragment was ligated into the pCRII TA CLONING® vector, available from Invitrogen, and sequenced using standard sequencing methods. Sequencing revealed that nucleotides 294-365 of nCfOSD₃₆₅ match nucleotides 1-72 of molecule nCfOSD₃₁, described above. The sequences from the partial length clones described were aligned to produce a sequence including a full-length coding region of 604 nucleotides, referred to as nCfOSD₆₀₄, denoted herein as SEQ ID NO:37, where nCfOSD₃₁₁ is identical in sequence to nucleotides 294-604 of SEQ ID NO:37 and nCfOSD₃₆₅ is identical in sequence to nucleotides 1-365 of SEQ ID NO:37. The complement of SEQ ID NO:37 is represented herein as SEQ D NO:39.

[0299] Translation of SEQ ID NO:37 suggests that nucleic acid molecule nCfOSD₆₀₄ encodes a full-length OS-D protein of 135 amino acids, referred to herein as PCfOSD₁₃₅, having an amino acid sequence represented by SEQ ID NO:38, assuming the initiation codon spans from nucleotide 26 through nucleotide 28 of SEQ ID NO:37 and the termination codon spans from nucleotide 431 through nucleotide 433 of SEQ ID NO:37. The coding region encoding PCfOSD₁₃₅, is represented by nucleic acid molecule nCfOSD₄₀₅, having a coding strand with the nucleic acid sequence represented by SEQ ID NO:40 and a complementary strand with nucleic acid sequence represented by SEQ ID NO:42. The amino acid sequence of PCfOSD₁₃₅, also represented as SEQ ID NO:41, predicts that PCfOSD₁₃₅ has an estimated molecular weight of about 15 kDa and an estimated pI of about 8.6. Analysis of SEQ ID NO:38 suggests the presence of a signal peptide encoded by a stretch of amino acids spanning from about amino acid 1 through about amino acid 20. The proposed mature protein, denoted herein as PCfOSD₁₃₅, contains about 115 amino acids corresponding to amino acids 21 through 135 of SEQ ID NO:38. The predicted pI of the mature protein (i.e. the protein with the signal peptide removed) is 6.6.

[0300] Comparison of amino acid sequence SEQ ID NO:38 with amino acid sequences reported in GENBANK® indicates that SEQ ID NO:38 showed the most homology, i.e., about 60% identity, with a Schistocerca gregaria chemosensory protein CSP-sg4, GENBANK® Accession No. 3283938. Comparison of SEQ ID NO:40 with nucleic acid sequences reported in GENBANK® indicates that SEQ ID NO:40 showed the most homology, i.e., about 58% identity, with a Schistocerca gregaria chemosensory protein CSP-sg4 nucleic acid molecule, GENBANK® Accession number AF070964. Comparison of SEQ ID NO:40 with nucleic acid molecules sequenced when screening the HNC subtracted and unsubtracted libraries described in Example 2 revealed that OS-D (i.e. SEQ ID NO:40) is expressed in each of these libraries. Additional sequence analysis revealed that there are four cysteines present in C. felis OS-D which are conserved in sequence alignments with the four cysteines of OS-D-like molecules of other insects, including D. melanogaster OS-D protein GENBANK® Accession No. U02546, S. gregaria chemosensory protein CSP-sg4, GENBANK® Accession number AF070964, and cockroach leg regenerative protein, GENBANK® Accession No. AF030340. Percent identity calculations and additional sequence analysis was performed using GCG® version 9.0 using default parameters.

[0301] A nucleic acid molecule comprising nucleotides 91 through 447 of SEQ ID NO:37, encoding a predicted mature flea OS-D protein, was PCR amplified using the PBLUESCRIPT® clone described above as the template, using sense primer OSD-FE, having nucleotide sequence 5′ CGC GGA TCC AGA AGA TAA ATA TAC TAG CAA ATT TGA TAA G 3′, having a BamHI site indicated in bold, designated herein as SEQ ID NO:61, and anti-sense primer OSD-RE, having nucleotide sequence 5′ GAG GAA TTC CTC TTT TTG GAA ATT TAA ACT GTA ACG G 3′, having an EcoRI site indicated in bold, designated herein as SEQ ID NO:62. PCR reactions were performed using standard PCR reaction and thermocycling conditions described in Example 4; the product was separated by agarose gel electrophoresis, and a fragment was excised and purified using a Gel Purification Kit, available from Qiagen. The fragment was digested with BamHI and EcoRI and ligated into the vector pTrcHisB, available from Invitrogen, that had been digested with BamHI and EcoRI and treated with alkaline phosphatase. The resulting recombinant molecule, referred to herein as pTrc-nCfOSD₃₅₇, was transformed into E. coli strain BL21, available from Novagen, to form recombinant cell E. coli:pTrc-nCfOSD₃₅₇.

[0302] The recombinant cell was grown under standard conditions then incubated in the presence of 0.5 mM IPTG to induce expression of recombinant protein, predicted to be approximately 17-kDa. Expression of protein was confirmed using Coomassie-blue-stained Tris-glycine gel and by Western blot using a T7 tag antibody which showed expression of an about 17 kDa protein.

[0303] A Northern Blot analysis was conducted as follows to determine whether OS-D mRNA is expressed exclusively in HNC tissues. HNC tissues were dissected from 1500 adult cat blood-fed C. felis having a male to female ratio of 1:4. Total RNA was separately extracted from HNC tissues and the HNC-less carcasses that resulted from these dissections using a standard guanidine lysis method, described by Sambrook et al., ibid.

[0304] Approximately 15 μg of each RNA were separated by electrophoresis on either Glyoxal gels with RNA prepared according to Burnett, Biotechniques, 22:4, pp. 668-671, 1997, or formaldehyde gels with RNA prepared according to Sambrook et al., ibid. Following electrophoresis, RNA was blotted to Hybond N nylon membranes, available from Amersham, according to the protocols described in Burnett and Sambrook et el. ibid. The membrane was UV cross-linked using the STRATALINKER®, available from Stratagene, and placed in approximately 30 ml of hybridization buffer consisting of 5×SSPE, 1% Sarcosyl, 50% formamide, 5×Denhardt's reagent and 25 mM EDTA at 42° C. for approximately 3 to 6 hours. A probe comprising the flea OS-D nucleic acid molecule nCfOSD₃₅₇ was labeled with α-³²P-ATP using a DNA labeling kit, available from Amersham and added to the buffer at a concentration of approximately 1×116 cpm/ml, and allowed to hybridize for about 14 to 18 hours at 42° C. The blot was then washed twice for 10 minutes per wash in 0.5×SSPE and 0.1% sarcosyl at 55° C. and exposed to film for autoradiography. Analysis of the developed film showed that there was greater expression of OS-D mRNA in HNC tissues compared to non-HNC tissues, indicating possible upregulation of OS-D in flea head and nerve cords.

### Example 11

[0305] This example describes the cloning and sequencing of a C. felis N-methyl-D-aspartate receptor associated (NMDA) nucleic acid molecule.

[0306] A TA clone from the HMT EST library described in Example 1 was sequenced using standard sequencing methods and shown to have significant homology to NMDA genes. This clone was digested with EcoRI to excise an insert 279 nucleotides in length, referred to as flea NMDA nucleic acid molecule nCfNMDA₂₇₉. The insert was isolated by gel purification using a Gel Purification kit, available from Qiagen. Approximately 50 ng of purified nCfNMDA₂₇₉ was used to construct a ³²P α-dATP labeled DNA probe using a MEGAPRIME® DNA labeling kit, available from Amersham, using the manufacturer's protocols.

[0307] The ³²P α-dATP labeled probe was used in a plaque lift hybridization procedure to isolate a clone from the HMT lambda-ZAP unsubtracted cDNA library described in Example 1, using standard hybridization conditions described in Example 4. Plaques that hybridized strongly to the probe were isolated and subjected to in vivo excision. In vivo excision was performed using the Stratagene EX-ASSIST® helper phage system and protocols, to convert a positive plaque to PBLUESCRIPT® plasmid DNA and sequencing was conducted following preparation of DNA with a Qiagen QIAPREP® spin mini prep kit using the manufacturer's instructions and restriction enzyme digestion with about 1 μl of 20 U/μl each of EcoRI and XhoI, available from New England Biolabs. A clone was isolated from a secondary plaque, containing a nucleic acid molecule of about 1227 base pairs, referred to herein as nCfNMDA₁₂₂₇, having a nucleotide sequence denoted herein as SEQ ID NO:43. The complement of SEQ ID NO:43 is represented herein as SEQ ID NO:45. Sequencing of nCfNMDA₂₇₉ indicates that nCfNMDA₂₇₉ shared 100% identity with nucleotides 709 through 987 of SEQ ID NO:43.

[0308] Translation of SEQ ID NO:43 suggests that nucleic acid molecule nCfNMDA₁₂₂₇ encodes a fall-length NMDA protein of 246 amino acids, referred to herein as PCfNMDA₂₄₆, having an amino acid sequence represented by SEQ ID NO:44, assuming the initiation codon spans from nucleotide 312 through nucleotide 314 of SEQ ID NO:43 and the termination codon spans from nucleotide 1050 through nucleotide 1052 of SEQ ID NO:43. The coding region encoding PCfNMDA₂₄₆, is represented by nucleic acid molecule nCfNMDA₇₃₈, having a coding strand with the nucleic acid sequence represented by SEQ ID NO:46 and a complementary strand with nucleic acid sequence represented by SEQ ID NO:48. The amino acid sequence of PCfNMDA₂₄₆, also represented as SEQ ID NO:47 predicts that PCfNMDA₂₄₆ has an estimated molecular weight of about 27 kDa and an estimated pI of about 5.6.

[0309] Comparison of amino acid sequence SEQ ID NO:44 with amino acid sequences reported in GENBANK® indicates that SEQ ID NO:44 showed the most homology, i.e., about 34% identity, with a Emericella nidulans negative-acting regulatory protein, GENBANK® Accession No. 3676056. Comparison of SEQ ID NO:46 with nucleic acid sequences reported in GENBANK® indicates that SEQ ID NO:46 showed the most homology, i.e., about 45% identity, with a Drosophila melanogaster NMDA nucleic acid molecule, GENBANK® Accession number L37377. Percent identity calculations were performed using GCG® version 9.0 using default parameters.

### Example 12

[0310] This example describes the cloning and sequencing of C. felis chemical sense related lipophilic ligand binding protein nucleic acid molecule. This example also describes the expression of chemical sense related lipophilic ligand binding protein mRNA in a variety of flea tissues.

[0311] A TA clone from the HNC EST library described in Example 2 was sequenced using standard sequencing methods and shown to have significant homology to chemical sense related lipophilic ligand binding protein (CLBP) genes. This clone was digested with EcoRI to excise an insert 339 nucleotides in length, referred to as flea CLBP nucleic acid molecule nCfCLBP₃₃₉. The insert was isolated by gel purification using a Gel Purification kit, available from Qiagen, Chatsworth, Calif. Approximately 50 ng of purified nCfCLBP₃₃₉ was used to construct a ³²P α-dATP labeled DNA probe using a MEGAPRIME® DNA labeling kit, available from Amersham, using the manufacturer's protocols.

[0312] The ³²P α-dATP labeled probe was used in a standard plaque lift hybridization procedure to isolate a clone from the HNC lambda-ZAP unsubtracted cDNA library described in Example 2. The following hybridization conditions were used. Filters were hybridized with about 5×10⁷ counts per minute (cpm) per ml of the probe in 100 ml of buffer (5×SSPE, 1% Sarcosyl, 0.1 mg/ml BLOTTO) at 45° C. for about 14 hours. The filters were washed twice for 20 minutes per wash in 500 ml of 0.5×SSPE and 0.1% Sarcosyl at 55° C. and subjected to autoradiography. Two plaques that hybridized strongly to the probe were isolated and subjected to in vivo excision using the Stratagene EX-ASSIST® helper phage system and protocols. Miniprep DNA was prepared from each positive clone using a QUANTUM PREPS mini prep kit, available from BioRad, Hercules, Calif., and sequenced using standard sequencing procedures. Sequencing revealed that the two positive clones share 97% amino acid identity to each other. The first clone contained a nucleic acid molecule of about 633 nucleotides, referred to herein as nCfCLBP1A₆₃₃, having a nucleotide sequence denoted herein as SEQ ID NO:153. The complement of SEQ ID NO:153 is represented herein as SEQ ID NO:155. The second clone contained a nucleic acid molecule of about 631 nucleotides, referred to herein as nCfCLBP2A₆₃₁, having a nucleotide sequence denoted herein as SEQ ID NO:162. The complement of SEQ ID NO:162 is represented herein as SEQ ID NO:164. Sequencing of nCfCLBP₃₄₀ indicated that nCfCLBP₃₃₉ shared 100% identity with nucleotides 1 through 339 of SEQ ID NO:153 and shared 100% identity with nucleotides 2 through 339 of SEQ ID NO:162.

[0313] Translation of SEQ ID NO:153 suggests that nucleic acid molecule nCfCLBP1A₆₃₃ encodes a full-length CLBP protein of 147 amino acids, referred to herein as PCfCLBP1A₁₄₇, having an amino acid sequence represented by SEQ ID NO:154, assuming the initiation codon spans from nucleotide 67 through nucleotide 69 of SEQ ID NO:153 and the termination codon spans from nucleotide 511 through nucleotide 513 of SEQ ID NO:153. The coding region encoding PCfCLBP1A₁₄₇, is represented by nucleic acid molecule nCfCLBP1A₄₄₁, having a coding strand with the nucleic acid sequence represented by SEQ ID NO:156 and a complementary strand with nucleic acid sequence represented by SEQ ID NO:158. The amino acid sequence of PCfCLBP1A₁₄₇, also represented by SEQ ID NO:157, predicts that PCfCLBP1A₁₄₇ has an estimated molecular weight of about 15 kDa and an estimated pI of about 5.

[0314] Analysis of SEQ ID NO:154 suggests the presence of a signal peptide encoded by a stretch of amino acids spanning from about amino acid 1 through about amino acid 19. The proposed mature protein, denoted herein as PCfCLBP1A₁₂₈, contains 128 amino acids which is represented herein as SEQ ID NO:160. PCfCLBP1A₁₂₈ is encoded by a nucleic acid molecule denoted nCfCLBP1A₃₈₄ having a coding strand with nucleic acid sequence SEQ ID NO:159 and a complementary strand with SEQ ID NO:161.

[0315] Translation of SEQ ID NO:162 suggests that nucleic acid molecule nCfCLBP2A₆₃₁ encodes a full-length CLBP protein of 147 amino acids, referred to herein as PCfCLBP2A₁₄₇, having an amino acid sequence represented by SEQ ID NO:163, assuming the initiation codon spans from nucleotide 65 through nucleotide 67 of SEQ ID NO:162 and the termination codon spans from nucleotide 509 through nucleotide 511 of SEQ ID NO:162. The coding region encoding PCfCLBP2A₁₄₇, is represented by nucleic acid molecule nCfCLBP2A₄₄₁, having a coding strand with the nucleic acid sequence represented by SEQ ID NO:165 and a complementary strand with nucleic acid sequence represented by SEQ ID NO:167. The amino acid sequence of PCfCLBP2A₁₄₇ predicts that PCfCLBP2A₁₄₇ has an estimated molecular weight of about 15 kDa and an estimated pI of about 5.

[0316] Analysis of SEQ ID NO:163 suggests the presence of a signal peptide encoded by a stretch of amino acids spanning from about amino acid 1 through about amino acid 19. The proposed mature protein, denoted herein as PCfCLBP2A₁₂₈, contains about 128 amino acids which is represented herein as SEQ ID NO:169. PCfCLBP2A₁₂₈ is encoded by a nucleic acid molecule denoted nCfCLBP2A₃₈₄ having a coding strand with nucleic acid sequence SEQ ID NO:168 and a complementary strand with SEQ ID NO:170.

[0317] Comparison of amino acid sequences SEQ ID NO:154 and SEQ ID NO:163 with amino acid sequences reported in GENBANK® indicates that each sequence showed the most homology, i.e., about 29% identity, with a Drosophila melanogaster pheromone binding protein related protein 2 (PBPRP-2), GENBANK® Accession No. 1709595. Percent identity calculations were performed using GCG® version 9.0 using default parameters. Blast comparison of nucleic acid sequences SEQ ID NO:156 and SEQ ID NO:165 with nucleic acid sequences reported in GENBANK® indicates that each sequence showed the most homology to a human Xp22 PAC PRCI1-5G11 nucleic acid molecule, GENBANK® Accession number AC002369. Pairwise identity could not be performed as the human clone in GENBANK® is too large to load into GCG® version 9.0. Blast comparison performed using default parameters showed an insignificant level of identity of 0.87. Additional sequence analysis revealed that there are six cysteines present in C. felis CLBP which are conserved in sequence alignments with the six cysteines of neuronal/sense-related molecules in the PBP/GOBP family, including D. melanogaster PBPRP-2, GENBANK® Accession No. 1709595, and PBPRP-5, GENBANK® Accession No. P54195, proteins, and Phormia regina chemical sense related lipophilic ligand binding protein (CSRLLBP), GENBANK® Accession No. S65458.

[0318] A Northern Blot analysis was conducted to determine whether CLBP mRNA is expressed exclusively in HNC tissues. HNC tissues were dissected, total RNA was isolated and separated by electrophoresis as described in Example 10.

[0319] Following electrophoresis, RNA was blotted as described in Example 10 and a probe comprising clone nCfCLBP₃₄₀ labeled with α-³²P-ATP was added to the buffer at a concentration of approximately 1×10⁶ cpm/ml and allowed to hybridize for about 14 to 18 hours. The blot was then washed as described in Example 10 and exposed to film for autoradiography. Analysis of the developed film showed that there was greater expression of CLBP mRNA in HNC tissues compared to non-HNC tissues, indicating possible upregulation of CLBP in flea head and nerve cords.

[0320] The coding region of nCfCLBP2A₆₃₁, i.e. SEQ ID NO:162, was PCR amplified from the PBLUESCRIPT® clone described above as the template, using sense primer 2A1BamSen having nucleotide sequence 5′ ATG GAT CCG GCA AAA TAT ACC AAA GAA GAA G 3′, having a BamHI site indicated in bold, designated herein as SEQ ID NO:1952, and anti-sense primer 2A1antiR1, having nucleotide sequence 5′ ATG AAT TCT TAT ATT GGT ATC GCG TCC ATT 3′, having a EcoRI site indicated in bold, designated herein as SEQ ID NO:1953. PCR reactions were performed using the following thermocycling conditions: (a) one cycle at 95° C. for one minute; (b) five cycles at 94° C. for ten seconds, 49° C. for twenty-five seconds, and 69° C. for one minute; and (c) twenty-three cycles at 94° C. for ten seconds, 53° C. for twenty seconds, and 69° C. for seventy-five seconds, in reactions containing 0.2 mM dNTPs, 1 μM of each primer, 0.5 μl of 5 U/μl KlenTaq Advantage polymerase, available from Clontech, 1 μl of 1 μg/μl template, and 1× KlenTaq buffer, hereinafter referred to as “standard PCR conditions”. The PCR product was digested with BamHI and EcoRI and ligated into the vector pTrcHisB, available from Invitrogen, that had been digested with BamHI and EcoRI. The resulting recombinant molecule, referred to herein as pTrc-nCfCLBP2A₄₄₁, was transformed into E. coli strain BL21, available from Novagen Inc., Madison, Wis., to form recombinant cell E. coli:pTrc-nCfCLBP2A₄₄₁.

[0321] The recombinant cell was grown under standard conditions and then incubated in the presence of 0.5 μM isopropylthio-β-galactoside (IPTG) to induce expression of recombinant protein. Expression was confirmed using Coomassie-blue-stained Tris-glycine gel and by Western blot using a T7 tag antibody, available from Novagen, which showed expression of an about 18 kDa protein. The protein product was purified as follows. The recombinant cells were collected by centrifugation, the supernatant was discarded and the pellets were resuspended and homogenized in 60 ml (total) of 50 mM Tris pH8.0 containing 500 nM NaCl and 1 mM phenylmethylsulfonyl fluoride (PMSF). The sample was then passed through the microfluidizer five times, rocked at 4° C. for 20 minutes, and centrifuged at 20,000×G for 30 minutes. The supernatant was collected and filtered through a 0.45 um filter then run over a HITRAP® Chelating column, available from Amersham Pharmacia, in 50 mM Tris pH8 containing 50 mM NaCl and 10 mM imidazole and eluted with an increasing imidazole gradient. The recombinant protein was eluted at approximately l 50 mM imidazole. Fractions containing recombinant protein were pooled and concentrated using a Centricon Plus-20 (Amicon), and diafiltered into PBS. Quantification of the protein was performed by densitometry against a known standard.

### Example 13

[0322] This Example describes the further characterization and expression of a Sodium/Hydrogen Transporter-like cDNA isolated by EST sequencing described in Example 1.

[0323] A cDNA designated clone 2231-94 was isolated from the unsubtracted HMT library as described in Example 1. Analysis of clone 2231-94 indicated that the cDNA, denoted nCfNAH₂₀₈₀, is about 2080 nucleotides in length, having a coding strand with nucleic acid sequence SEQ ID NO:1867 and a complementary sequence having SEQ ID NO:1869. Translation of SEQ ID NO:1867 suggests that nucleic acid molecule nCfNAH₂₀₈₀ encodes a full-length Sodium/Hydrogen Transporter-like protein of 608 amino acids, referred to herein as PCfNAH₆₀₈, having an amino acid sequence represented by SEQ ID NO:1868, assuming the initiation codon spans from nucleotide 45 through nucleotide 47 of SEQ ID NO:1867 and the termination codon spans from nucleotide 1869 through nucleotide 1871 of SEQ ID NO:1867. The coding region encoding PCfNAH₆₀₈, is represented by nucleic acid molecule nCfNAH₁₈₂₄, having a coding strand with the nucleic acid sequence represented by SEQ ID NO:1870 and a complementary strand with nucleic acid sequence represented by SEQ ID NO:1871. The amino acid sequence of SEQ ID NO:1868, predicts that PCfNAH₆₀₈ has an estimated molecular weight of about 67.9 kDa and an estimated isoelectric point (pI) of about 6.47.

[0324] Comparison of amino acid sequence SEQ ID NO:1868 with amino acid sequences reported in GENBANK® indicates that SEQ ID NO:1868 showed the most homology, i.e., about 67.7% identity, with a sodium hydrogen exchanger NHE1 (Accession # AAD32689.1). Comparison of SEQ ID NO:1867 with nucleic acid sequences reported in GENBANK® indicates that SEQ ID NO:1867 showed the most homology, i.e. about 59.5% identity, with a Drosophila melanogaster sodium hydrogen exchanger NHE1 (Accession # AF142676). Percent identity calculations were performed using GCG® version 9.0 using default parameters.

[0325] In order to express the full-length putative NaH protein, the entire coding region was amplified by PCR and then ligated into the INSECTSELECT™ expression vector pIB/V5-His, available from Invitrogen, as follows. Forward primer NaH-IS-FE, which corresponds to nucleotides 42-74 of SEQ ID NO:1867, having the sequence 5′ GAC TAG TAA AAT GGG CGT TAA AAA TAT ATA TTT ATA CTG C 3′, denoted SEQ ID NO:1939 and having a SpeI site indicated in bold, was used in conjunction with reverse primer NaH-IS-RE, which is complementary to nucleotides 1845-1867 of SEQ ID NO:1867, having the sequence 5′ CCG CTC GAG GTA CTG CAC GTA CTA ACG TCA TC 3′, denoted SEQ ID NO:1940 and having a XhoI restriction site indicated in bold, in a PCR reaction using SEQ ID NO:1867 as the template. Standard PCR reaction conditions were used with the following thermocycling conditions: (1) 94° C. for 30 seconds, (2) 25 cycles of 94° C. for 10 seconds, 55° C. for 10 seconds and 72° C. for 3 minutes. The products of this reaction were separated on a 1.5% agarose gel, and a band corresponding to an approximately 1825 nucleotide molecule was cut from the gel and purified using the QIAQUICK® Gel Extraction Kit as described above. The PCR product was then digested with SpeI and XhoI restriction endonucleases for 18 hours at 37°. The digestion product was purified using the QIAQUICK® Nucleotide Removal Kit, available from Qiagen, and ligated into the vector pIB/V5-His which had also been digested with SpeI and XhoI and treated with shrimp alkaline phosphatase, available from New England BioLabs, Inc., for 30 minutes at 37°. Following standard transformation procedures, a bacterial clone containing the plasmid pIB/V5-His-NaH was isolated. DNA sequence analysis of the clone confirmed that nucleotides 42-1867 of SEQ ID NO:1867, referred to herein as nCfNAH₁₈₂₆, had been successfully ligated into the pIB/V5-His expression vector in frame with the C-terminal V5 epitope encoded by the vector.

[0326] A Northern Blot analysis was conducted as described in Example 4 to determine whether NaH mRNA is expressed only in certain life stages of the flea life cycle and whether NaH mRNA is expressed only in HMT tissue. Total RNA was extracted from eggs, first, third, and wandering larvae, pupae, unfed adults, and adults fed on cat blood for 0.25, 2, 8, and 24 hours. In addition, total RNA was extracted from hindguts and Malpighian tubules extracted from 24 hour cat blood-fed adult fleas, and from the remaining body parts following the removal of hindguts and Malpighian tubules. Each RNA sample was separated by gel electrophoresis, transferred to nylon membranes and hybridized with α-³²P-ATP labeled nCfNAH₁₈₂₆ under the Northern Blotting conditions described in Example 4. Analysis of the developed film revealed that NAH mRNA was expressed in the 0.25, 2, and 8 hour adult fed timepoints only.

### Example 14

[0327] This Example describes the further characterization of a Chloride Intracellular Channel-like cDNA isolated by EST sequencing described in Example 1.

[0328] A cDNA designated clone 2233-24 was isolated from the unsubtracted HMT library as described in Example 1. Analysis of clone 2233-24 indicated that the cDNA, denoted nCfCLIC₂₂₈₃ is about 2283 nucleotides in length, having a coding strand with nucleic acid sequence SEQ ID NO:1872 and a complementary sequence having SEQ ID NO:1874. Translation of SEQ ID NO:1872 suggests that nucleic acid molecule nCfCLIC₂₂₈₃ encodes a full-length Chloride Intracellular Channel-like protein of 262 amino acids, referred to herein as PCfCLIC₂₆₂, having an amino acid sequence represented by SEQ ID NO:1873, assuming the initiation codon spans from nucleotide 60 through nucleotide 62 of SEQ ID NO:1872 and the termination codon spans from nucleotide 846 through nucleotide 848 of SEQ ID NO:1872. The coding region encoding PCfCLIC₂₆₂, is represented by nucleic acid molecule nCfCLIC₇₈₆, having a coding strand with the nucleic acid sequence represented by SEQ ID NO:1875 and a complementary strand with nucleic acid sequence represented by SEQ ID NO:1876. The amino acid sequence of SEQ ID NO:1873, predicts that PCfCLIC₂₆₂ has an estimated molecular weight of about 30.2 kDa and an estimated isoelectric point (pI) of about 6.02.

[0329] Comparison of amino acid sequence SEQ ID NO:1873 with amino acid sequences reported in GENBANK® indicates that SEQ ID NO:1873 showed the most homology, i.e., about 37.8% identity, with a Homo sapiens chloride intracellular channel 2 (Accession # NP001280.1). Comparison of SEQ ID NO:1872 with nucleic acid sequences reported in GENBANK® indicates that SEQ ID NO:1872 showed the most homology, i.e., about 37.5% identity with a Homo sapiens chloride intracellular channel 2 (Accession # NM001289). Percent identity calculations were performed using GCG® version 9.0 using default parameters.

### Example 15

[0330] This Example describes the further characterization of a Peritrophin-like cDNA, referred to herein as PL2, isolated by EST sequencing described in Example 1.

[0331] A cDNA designated clone 2232-23 was isolated from the unsubtracted HMT library as described in Example 1, denoted herein as SEQ ID NO:1877. Analysis of clone 2232-23 indicated that the cDNA, denoted nCfPL2₄₅₇ is about 457 nucleotides in length. Translation of the coding strand of nCfPL2₄₅₇ suggests that nucleic acid molecule nCfPL2₄₅₇ encodes a partial-length Peritrophin-like protein of 113 amino acids, referred to herein as PCfPL2₁₁₃, assuming a stop coding at nucleotides 342-344 of nCfPL2₄₅₇.

[0332] Additional coding sequence corresponding to the 5′ end of nCfPL2₄₅₇ was isolated by PCR performed using a RACE cDNA pool prepared as described in Example 3 as template. A first PCR reaction was performed using reverse primer PL2-R1, which is complementary to nucleotides 167-187 of the nCfPL2₄₅₇ cDNA, having a nucleic acid sequence 5′ GTC TGG AAG CTC AGG AAG AGG 3′, denoted herein as SEQ ID NO:1941, in conjunction with forward Adapter Primer 1, SEQ ID NO:1933, described above under the following thermocycling conditions: (1) 94° C. for 30 seconds, (2) 5 cycles of 94° C. for 10 seconds and 72° C. for 4 minutes, (3) 5 cycles of 94° C. for 10 seconds and 70° C. for 4 minutes, and (4) 25 cycles of 94° C. for 10 seconds then 68° C. for 4 minutes. The product of this reaction was diluted 1:50 and used as template for a second PCR reaction as follows: Forward adapter primer 2, SEQ ID NO:1935, was used with reverse primer PL2-R2, which is complementary to nucleotides 29-52 of the nCfPL2₄₅₇ cDNA, having a nucleic acid sequence 5′ GTA ATA TGC GTG ACA ATC GTG TOG 3′, denoted herein as SEQ ID NO:1942, using the thermocycling conditions described for the first PCR reaction. The resulting product was gel purified as described above to reveal a distinct band corresponding to nucleic acid molecule of approximately 900 bp in length. The fragment was then ligated into the pCR II TA CLONING® vector, available from Qiagen and sequenced using an ABI PRISM® 377 automatic DNA Sequencer. Sequencing revealed that nucleotides 791-835 of the fragment had 100% identity with nucleotides 1-45 of the nCfPL2₄₅₇ cDNA. The two sequences were aligned to form a contiguous sequence, denoted nCfPL2₁₂₉₁, which is about 1291 nucleotides in length, having a coding strand with nucleic acid sequence SEQ ID NO:1878 and a complementary sequence having SEQ ID NO:1879. Translation of SEQ ID NO:1878 suggests that nucleic acid molecule nCfPL2₁₂₉₁ encodes a non full-length Peritrophin-like protein of 391 amino acids.

[0333] In order to isolate the additional sequence corresponding to the 5′ end of SEQ ID NO:1878, nested PCR reactions were performed using the RACE cDNA pool as template. For the first PCR, forward adapter primer AP1 was used with reverse primer PL2-R1 under standard PCR reaction conditions and the following thermocycling conditions: (1) 94° C. for 1 minute, (2) 5 cycles of 94° C. for 20 seconds and 70° C. for 1 minute, (3) 5 cycles of 94° C. for 20 seconds and 68° C. for 1 minute, (4) 10 cycles of 94° C. for 20 seconds and 66° C. for 1 minute. The products of this reaction were diluted 1:50 in water and used as template for the second, nested PCR. The second PCR reaction used forward adapter primer AP2 in conjunction with reverse primer PL2-R5, which is complementary to nucleotides 70-93 of SEQ ID NO:1878, having a nucleotide sequence 5′ CGG TGC AAG TTA TAG AAC CTT CCG 3′, denoted herein as SEQ ID NO:1943 under standard PCR reaction conditions using the following thermocycling conditions: (1) 94° C. for 1 minute, (2) 5 cycles of 94° C. for 20 seconds and 70° C. for 1 minute, (3) 5 cycles of 94° C. for 20 seconds and 68° C. for 1 minute, (4) 40 cycles of 94° C. for 20 seconds and 66° C. for 1 minute. The products of this reaction were separated by agarose gel electrophoresis and a band approximately 279 nucleotides in length was excised from the gel and purified as described above. The fragment, referred to as nCfPL2₂₇₉ having a coding nucleic acid sequence designated SEQ ID NO:1880 and a complementary sequence designated SEQ ID NO:1881, was then ligated into the pCROII TA CLONING® vector, available from Qiagen, and sequenced as described above. Sequencing revealed that nucleotides 228-279 of nCfPL2₂₇₉ were identical to nucleotides 42-93 of SEQ ID NO:1878, however, nucleotides 186-228 of nCfPL2₂₇₉ had no significant similarity to SEQ ID NO:1878. This discrepancy may be the result of alternative RNA splicing or may be an artifact of the cDNA pool. To determine the reason for this discrepancy, additional fragments corresponding to this region were isolated by PCR from flea cDNA libraries from adult midguts, hindgut and Malpighian tubules and mixed instar larvae using techniques described herein. Sequence analysis of fragments obtained from these libraries revealed that these fragments were identical in sequence to the sequence of nCfPL2₂₇₉, therefore, the region of SEQ ID NO:1878 which did not align to nCfPL2₂₇₉ was deemed to be an artifact and was not used in subsequent alignments.

[0334] The PL2 sequences described above were aligned to form a contiguous sequence, denoted nCfPL2₁₄₇₇, which is about 1477 nucleotides in length, having a coding strand with nucleic acid sequence SEQ ID NO:1882 and a complementary sequence having SEQ ID NO:1884. Translation of SEQ ID NO:1882 suggests that nucleic acid molecule nCfPL2₁₄₇₇ encodes a full-length Peritrophin-like protein of 453 amino acids, referred to herein as PCfPL2₄₅₃, having an amino acid sequence represented by SEQ ID NO:1883, assuming an initiation codon spanning from nucleotide 3 through nucleotide 5 of SEQ ID NO:1882 and a termination codon spanning from nucleotide 1362 through nucleotide 1364 of SEQ ID NO:1882. The coding region encoding PCfPL2₄₅₃, is represented by nucleic acid molecule nCfPL2₁₃₅₉, having a coding strand with the nucleic acid sequence represented by SEQ ID NO:1885 and a complementary strand with nucleic acid sequence represented by SEQ ID NO:1886. The amino acid sequence of SEQ ID NO:1883, predicts that PCfPL2₄₅₃ has an estimated molecular weight of about 49 kDa and an estimated isoelectric point (pI) of about 4.7.

[0335] Comparison of amino acid sequence SEQ ID NO:1883 with amino acid sequences reported in GENBANK® indicates that SEQ ID NO:1883 showed the most homology, i.e., about 28% identity, with a Drosophila melanogaster locus AE003474 protein (Accession # AAF47629). Comparison of SEQ ID NO:1882 with nucleic acid sequences reported in GENBANK® indicates that SEQ ID NO:1882 showed the most homology, i.e., about 50% identity, Penaeus semisulcatus (a crustacean) peritrophin-like protein 1 cDNA (Accession # AF095580). Percent identity calculations were performed using GCG® version 9.0 using default parameters.

### Example 16

[0336] This Example describes the further characterization and expression of a Peritrophin-like sequence cDNA, referred to herein as PL3, isolated by EST sequencing described in Example 1.

[0337] A cDNA designated clone 2240-17 was isolated from the unsubtracted HMT library as described in Example 1. Analysis of clone 2240-17 indicated that the cDNA, denoted nCfPL3₄₀₆, is about 406 nucleotides in length, having a coding strand with nucleic acid sequence SEQ ID NO:1887 and a complementary sequence having SEQ ID NO:1889. Translation of SEQ ID NO:1887 suggests that nucleic acid molecule nCfPL3₄₀₆ encodes a full-length Peritrophin-like protein of 81 amino acids, referred to herein as PCfPL3₈₁, having an amino acid sequence represented by SEQ ID NO:1888, assuming the initiation codon spans from nucleotide 20 through nucleotide 22 of SEQ ID NO:1887 and the termination codon spans from nucleotide 263 through nucleotide 265 of SEQ ID NO:1887. The coding region encoding PCfPL3₈₁ is represented by nucleic acid molecule nCfPL3₂₄₃, having a coding strand with the nucleic acid sequence represented by SEQ ID NO:1890 and a complementary strand with nucleic acid sequence represented by SEQ ID NO:1891. The amino acid sequence of SEQ ID NO:1888, predicts that PCfPL3₈₁ has an estimated molecular weight of about 9.1 kDa and an estimated isoelectric point (pI) of about 3.64.

[0338] Comparison of amino acid sequence SEQ ID NO:1888 with amino acid sequences reported in GENBANK® indicates that SEQ ID NO:1888 showed the most homology, i.e., about 34.2% identity, with a Anopheles gambiae peritrophin 1 protein (Accession # AAC39127). Comparison of SEQ ID NO:1887 with nucleic acid sequences reported in GENBANK® indicates that SEQ ID NO:1887 showed the most homology, i.e., about 37% identity, with a Anopheles gambiae chloride intracellular channel 2 (Accession # AF030431). Percent identity calculations were performed using GCG® version 9.0 using default parameters.

[0339] In order to express the full-length putative PL3 protein, the entire coding region was amplified by PCR and then ligated into the E. coli expression vector pTrcHisB, available from Invitrogen, as follows. Forward primer PL3 FE, which corresponds to nucleotides 70-93 of SEQ ID NO:1887, having the sequence 5′ CGG GAT CCC GAA TAT GCT GAC GTA GAT GTG TG 31, denoted SEQ ID NO:1944, and having a BamHI restriction endonuclease site indicated in bold, was used in conjunction with reverse primer PL3RE, which is complementary to nucleotides 245-269 of SEQ ID NO:1887, having the sequence 5′ GGA ATT CTG TTT TAT TCT GGT TGG TAA CAT TC 3′, denoted herein as SEQ ID NO:1945 and having an EcoRI restriction endonuclease site indicated in bold, in a PCR reaction using SEQ ID NO:1887 as the template under standard PCR reaction conditions and the following thermocycling conditions: (1) 94° C. for 30 seconds, (2) 25 cycles of 94° C. for 10 seconds, 55° C. for 10 seconds and 72° C. for 3 minutes. The reaction product was separated on a 1.5% agarose gel, and a band corresponding to an approximately 200 nucleotide molecule, as visualized by agarose gel electrophoresis and ethidium bromide staining, was cut from the gel and purified using the QIAQUICK® Gel Extraction Kit as described above.

[0340] The product of the PCR reaction was the digested with BamHI and EcoRI restriction endonucleases, available from New England BioLabs, Inc. for 18 hours at 37° C., purified using the QIAQUICK® Nucleotide Removal Kit, available from Qiagen, and ligated into the vector pTrcHisB which had been similarly digested, treated with shrimp alkaline phosphatase, available from New England BioLabs, Inc., for 30 minutes at 37° C., and purified. Following standard transformation procedures into E. coli BL-21 competent cells, a bacterial clone containing the plasmid pTrcHisB-PL3 was isolated. DNA sequence analysis of the clone confirmed that 70-269 of SEQ ID NO:1887 had been successfully ligated into the pTrcHisB expression vector in frame with the N-terminal T7 Tag epitope encoded by the vector. The recombinant protein encoded thereby is predicted to be 97 amino acids in length and have a molecular mass of 10.9 kDa, including the T7 Tag and have a pI of 4.08.

[0341] A recombinant PL3 protein was expressed as follows. Five mls of Luria broth were innoculated with a glycerol stock of E. coli BL-21 competent cells, available from Novagen, Madison, Wis., that had been transformed with the pTrcHisB-PL3 plasmid prepared as described above and allowed to grow overnight at 37° C. under selection with 100 μg/ml ampicillin. A 1 ml aliquot of this culture was then used to inoculate 10 mls of fresh Luria broth containing 100 μg/ml ampicillin and the culture was allowed to grow to an approximate OD reading of 0.5. A 1 ml aliquot of the culture was removed, the cells were pelleted by centrifugation and the supernatant discarded. The cells were resuspended in a solution of 100 μl PBS and 100 μl of 2×SDS-PAGE loading buffer (100 mM Tris pH 6.8, 4% SDS, 20% glycerol, 0.02% bromophenol blue, and 10% 2-mercaptoethanol). Following removal of the 1 ml aliquot described above, IPTG was added to the remaining 9 ml culture to a final concentration of 5 mM of IPTG, the culture was incubated at 37° C. for an additional 60 minutes, 1 ml was removed and the OD measured at approximately 0.6. The cells in this 1 ml sample were then pelleted by centrifugation and resuspended in a solution of 120 μl of PBS and 120 μl of SDS-PAGE loading buffer. Equal volumes of the IPTG-induced and uninduced lysates were loaded onto a 14% Tris-Glycine SDS-PAGE gel, available from Novex, San Diego, Calif. Following electrophoresis, the proteins were transferred from the SDS-PAGE gel to a nitrocellulose membrane and a Western blot analysis was performed using the T7 tag antibody, available from Novagen, which revealed an approximately 18 kDa protein was induced by IPTG. The fact that the recombinant PL3 protein ran at a higher molecular weight than predicted is consistent with previous published results for other peritrophin proteins, and is thought to be due in part to the characteristically low pI of these proteins (Tellam et al., (1999) Peritrophic Matrix Proteins, Insect Biochemistry and Molecular Biology, 29:87-101). Sequence analysis of this protein indicates that it contained the N-terminal T7 Tag encoded by the vector.

[0342] Four flasks, each containing 1 liter of Luria broth with 100 μg/ml ampicillin were inoculated with a starter culture of 5 ml of E. coli BL-21 cells transformed with the pTrcHisB-PL3 plasmid as described above. The cultures were allowed to grow at 37° C. until the optical density reached approximately 0.500, at which time a 1 ml aliquot was removed from each flask as the pre-induction sample. IPTG was added to each 1 liter flask to a final concentration of 0.5 mM and the cultures allowed to grow at 37° C. for 135 additional minutes, at which time a 1 ml aliquot was removed from each flask as the post-induction sample. The 1 ml aliquots were centrifuged, the supernatants were discarded and the pellets were resuspended in 100 μl 2×SDS-PAGE loading buffer per each 0.5 optical density units measured. The pre-induction and post induction samples were then tested for recombinant PL3 protein expression using the standard Western blot techniques and the T7 Tag antibody described above. A protein running at approximately 18 kDa was detected in the post-induced but not in the pre-induced samples.

[0343] The cells from the remaining 4 liters of culture were centrifuged, the supernatants were discarded and the cell pellets were combined and resuspended in 120 mls of buffer A (50 mM Tris, PH 8.0, 20 mM NaCl, 1 mM phenylmethylsulfonyl fluoride (PMSF)). The sample was then passed through a microfluidizer five times then rocked at 4° C. for 20 minutes. The sample was then centrifuged for 30 minutes and the supernatant collected. Western blot analysis of the supernatant showed that the recombinant PL3 protein was soluble in the first buffer A extraction. The buffer A supernatant containing the recombinant PL3 protein was then further purified by a nickel column, a Q2 anion exchange chromatography column, and cation exchange chromatography, using techniques well known to those of skill in the art.

### Example 17

[0344] This Example describes the further characterization of a Peritrophin-like sequence cDNA, referred to herein as PL4, isolated by EST sequencing described in Example 1.

[0345] A cDNA designated clone 2244-71 was isolated from the unsubtracted HMT library as described in Example 1. Analysis of clone 2244-71 indicated that the cDNA, denoted nCfPL4₉₇₄, is about 974 nucleotides in length, having a coding strand with nucleic acid sequence SEQ ID NO:1892 and a complementary sequence having SEQ ID NO:1893. Translation of SEQ ID NO:1892 suggests that nucleic acid molecule nCfPL4₉₇₄ encodes a partial-length Peritrophin-like protein of 285 amino acids. Additional sequence corresponding to the 5′ end was isolated by PCR using the RACE cDNA pool described in Example 3 as the template, as follows. Adapter Primer 1, i.e. SEQ ID NO:1933, was used as the forward primer in conjunction with reverse primer PL4-R1, which is complementary to nucleotides 229-251 of SEQ ID NO:1892, having a nucleic acid sequence 5′ GAT ATC CAC TTT GAT CAG CGC AC 3′, denoted herein as SEQ ID NO:1946 in a PCR reaction under standard PCR reaction conditions and the following thermocycling conditions: (1) 94° C. for 30 seconds, (2) 5 cycles of 94° C. for 10 seconds and 72° C. for 4 minutes, (3) 5 cycles of 94° C. for 10 seconds and 70° C. for 4 minutes, (4) 25 cycles of 94° C. for 10 seconds then 68° C. for 4 minutes. The products of this reaction were diluted 1:50 and used as template in a second PCR reaction using Adapter Primer 2, i.e. SEQ ID NO:1935 as the forward primer and reverse primer PL4-R2, which is complementary to nucleotides 58-78 of SEQ ID NO:1892, having a nucleic acid sequence 5′ GGT ACT ACT CCT GGT GCG GGC 3′, denoted herein as SEQ ID NO:1947, using the thermocycling conditions described for the first PCR reaction. The products of this reaction were gel purified as previously described and the fragment was ligated into the pCR II TA CLONING® vector, available from Qiagen, and sequenced to reveal of fragment of approximately 150 nucleotides in length. Sequence analysis revealed that nucleotides 68-146 of the fragment had 100% identity with nucleotides 1-79 of nCfPL4₉₇₄. The two sequences were aligned to form a contiguous sequence of about 1043 nucleotides in length, referred to as nCfPL4₁₀₄₃, having a coding strand with SEQ ID NO:1894 and a complementary strand having SEQ ID NO:1895. However, the contiguous sequence does not appear to encode a starting methionine in the predicted protein sequence, thus, a second attempt to isolate the remaining coding sequences at the 5′ end was performed as follows. A first PCR reaction was performed with Adapter Primer 1 as the forward primer and PL4-R2 as the reverse primer using the RACE cDNA pool as the template under the thermocycling conditions described above. The products of this reaction were diluted 1:50 and used as the template in a second PCR reaction which used Adapter Primer 2 as the forward primer and reverse primer PL4-R4, which is complementary to nucleotides 58-80 of SEQ ID NO:1894, having the nucleic acid sequence 5′ CCG TCG ACA TTA AAC TCA CCA TC 3′, denoted SEQ ID NO:1948, under the thermocycling conditions described for the first PCR reaction. The products of this reaction were gel purified as previously described and the fragment was ligated into the pCR II TA CLONING® vector, available from Qiagen, and sequenced to reveal of fragment of approximately 100 nucleotides in length. Sequence analysis revealed that nucleotides 21-101 of the fragment had 100% identity with nucleotides 1-81 of SEQ ID NO:1892. The two sequences were aligned to form a contiguous sequence that is 1062 nucleotides in length, referred to herein as nCfPL4₁₀₆₂, having a coding strand with SEQ ID NO:1896 and a complementary strand with SEQ ID NO:1898. Translation of SEQ ID NO:1896 suggests that nucleic acid molecule nCfPL4₁₀₆₂ encodes a full-length Peritrophin-like protein of 285 amino acids, referred to herein as PCfPL4₂₈₅, having an amino acid sequence represented by SEQ ID NO:1897, assuming the initiation codon spans from nucleotide 19 through nucleotide 21 of SEQ ID NO:1896 and the termination codon spans from nucleotide 874 through nucleotide 876 of SEQ ID NO:1896. The coding region encoding PCfPL4₂₈₅, is represented by nucleic acid molecule nCfPL4₈₅₅, having a coding strand with the nucleic acid sequence represented by SEQ ID NO:1899 and a complementary strand with nucleic acid sequence represented by SEQ ID NO:1900. The amino acid sequence of SEQ ID NO:1897, predicts that PCfPL4₂₈₅ has an estimated molecular weight of about 31.4 kDa and an estimated isoelectric point (pI) of about 6.99.

[0346] Comparison of amino acid sequence SEQ ID NO:1897 with amino acid sequences reported in GENBANK® indicates that SEQ ID NO:1897 showed the most homology, i.e., about 31.5% identity, with a Drosophila melanogaster Gasp precursor (Accession # AAD09748). Comparison of SEQ ID NO:1896 with nucleic acid sequences reported in GENBANK® indicates that SEQ ID NO:1896 showed the most homology, i.e., about 39.4% identity, with a Drosophila melanogaster Gasp precourser (Accession #AF070734). Percent identity calculations were performed using GCG® version 9.0 using default parameters.

[0347] A Northern Blot analysis was conducted as described in Example 4 to determine whether PL4 mRNA is expressed only in certain life stages of the flea life cycle and whether PL4 mRNA is expressed only in HMT tissue. Total RNA was extracted from eggs, first, third, and wandering larvae, pupae, unfed adults, and adults fed on cat blood for 0.25, 2, 8, and 24 hours. In addition, total RNA was extracted from hindguts and Malpighian tubules extracted from 24 hour cat blood-fed adult fleas, and from the remaining body parts following the removal of hindguts and Malpighian tubules. Each RNA sample was separated by gel electrophoresis, transferred to nylon membranes and hybridized with α-³²P-ATP labeled nCfPL4₉₇₄ under the Northern Blotting conditions described in Example 4.

[0348] The results of the Northern blot assay are complex. Although stringent conditions were used, several bands with distinct expression patterns were seen. An approximately 1600 bp message was detected in the egg, first instar, third instar and wandering larval stages only. An approximately 1500 bp message was detected in all lifestages and adult fed timepoints, but with the strongest signals in the egg, first instar larval, and unfed adult stages. A third message, which ran approximately 1200 bp, was detected in the egg, first instar larval, pupal, and adult lifestages, including all unfed and fed adult timepoints. All three of the messages detected were seen only in the HMT tissues, and were not detected in the carcass tissues.

[0349] The detection of three mRNAs instead of one may be the result of the expression of three highly homologous transcripts. It has been reported in the literature that peritrophin gene families have been found that consist of a number of highly related genes (See Schorderet et al., 1998, cDNA and deduced amino acid sequences of a peritrophic membrane glycoprotein, ‘peritrophin-48’, from the larvae of Lucilia cuprina, Insect Biochemistry and Molecular Biology 28, 99-111). It is possible that these transcripts represent the products of such a family or that the messages are the RNA products of alternative splicing of a single gene locus.

### Example 18

[0350] This Example describes the further characterization of a synaptic vesicle 2B-like sequence cDNA, isolated by EST sequencing described in Example 1.

[0351] A cDNA designated clone 2104-59 was isolated from the subtracted HMT library as described in Example 1, denoted herein as SEQ ID NO:358. DNA from clone 2104-59 was purified, and the insert used for plaque hybridization screening of the unsubtracted HMT cDNA library as follows. The insert from clone 2104-59 was excised by digestion with EcoRI, separated by agarose gel electrophoresis and purified using the QIAQUICK® Gel Extraction kit, available from Qiagen. A MEGAPRIME® DNA labeling kit, available from Amersham Pharmacia, was used to incorporate α-³²P-labeled dATP into the random-primed probe mix. Hybridization and plaque purification were performed as previously described which resulted in the isolation of a clone containing an about 1875 nucleotide synaptic vesicle 2B-like sequence, referred to herein as nCfSVP₁₈₇₅, having a coding strand with nucleic acid sequence SEQ ID NO:1901 and a complementary sequence having SEQ ID NO:1903. Translation of SEQ ID NO:1901 suggests that nucleic acid molecule nCfSVP₁₈₇₅ encodes a full-length synaptic vesicle 2B-like protein of 530 amino acids, referred to herein as PCfSVP₅₃₀, having an amino acid sequence represented by SEQ ID NO:1902, assuming the initiation codon spans from nucleotide 44 through nucleotide 46 of SEQ ID NO:1901 and the termination codon spans from nucleotide 1634 through nucleotide 1636 of SEQ ID NO:1901. The coding region encoding PCfSVP₅₃₀₇ is represented by nucleic acid molecule nCfSVP₁₅₉₀, having a coding strand with the nucleic acid sequence represented by SEQ ID NO:1904 and a complementary strand with nucleic acid sequence represented by SEQ ID NO:1905. The amino acid sequence of SEQ ID NO:1902, predicts that PCfSVP₅₃₀ has an estimated molecular weight of about 58.7 kDa and an pI of about 7.61.

[0352] Comparison of amino acid sequence SEQ ID NO:1902 with amino acid sequences reported in GENBANK® indicates that SEQ ID NO:1902 showed the most homology, i.e., about 32% identity, with a Drosophila melanogaster BACR7A4.y (Accession # CAB51685). Comparison of SEQ ID NO:1901 with nucleic acid sequences reported in GENBANK® indicates that SEQ ID NO:1901 showed the most homology, i.e., about 39% identity, with a Rattus norvegicus synaptic vesicle protein 2B (SVP2B) mRNA (Accession # L10362). Percent identity calculations were performed using GCG® version 9.0 using default parameters.

### Example 19

[0353] This Example describes the further characterization of a Voltage-Gated Chloride Channel-like sequence cDNA, isolated by EST sequencing described in Example 1.

[0354] A cDNA designated clone 2108-09 was isolated from the unsubtracted HMT library as described in Example 1. Analysis of clone 2108-09 indicated that the cDNA, denoted nCfVGCC₃₈₁, is about 381 nucleotides in length, having a coding strand with nucleic acid sequence SEQ ID NO:1906 and a complementary sequence having SEQ ID NO:1907. Translation of SEQ ID NO:1906 suggests that nucleic acid molecule nCfVGCC₃₈, encodes a partial-length Voltage-Gated Chloride Channel-like protein of 126 amino acids. Additional sequence corresponding to the 5′ end was isolated by hybridization and PCR as follows.

[0355] The insert from clone 2108-09 was excised by digestion with EcoRI, separated by agarose gel electrophoresis and purified using the QIAQUICK® Gel Extraction kit, available from Qiagen. A MEGAPRIME® DNA labeling kit, available from Amersham Pharmacia, was used to incorporate α-³²P-labeled dATP into the random-primed probe mix. Hybridization and plaque purification were performed on the unsubtracted HMT cDNA library as previously described which resulted in the isolation of a clone containing an about 2191 nucleotide VGCC-like sequence, referred to herein as nCfVGCC₂₁₉₁, having a coding strand with nucleic acid sequence SEQ ID NO:1908 and a complementary sequence having SEQ ID NO:1909. Translation of SEQ ID NO:1908 suggests that nucleic acid molecule nCfVGCC₂₁₉₁ encodes a partial s VGCC-like protein of 595 amino acids.

[0356] In order to isolate the remaining coding regions at the 5′ end, a PCR was performed using the RACE cDNA pool, prepared as described in Example 3, as the template as follows. Adapter Primer 1 was used as the forward primer in conjunction with reverse primer VGCC-R1, which is complementary to the nucleotides 1482-1503 of SEQ ID NO:1908, having a nucleic acid sequence 5′ CGA TCA TGC GTC TAG CAT TGG C 3′, denoted herein as SEQ ID NO:1949 under standard PCR reaction conditions and the following thermocycling conditions: (1) 94° C. for 30 seconds, (2) 5 cycles of 94° C. for 10 seconds and 72° C. for 4 minutes, (3) 5 cycles of 94° C. for 10 seconds and 70° C. for 4 minutes, (4) 25 cycles of 94° C. for 10 seconds and 68° C. for 4 minutes. The reaction products were separated on an agarose gel and a band corresponding to an approximately 1970 nucleotide molecule was isolated, purified using a Gel Purification Kit, available from Qiagen, ligated into the pCR II TA CLONING® vector, available from Invitrogen, and sequenced using an ABI PRISM® 377 automatic DNA Sequencer. Sequence analysis revealed an approximately 1968 nucleotide fragment, referred to as nCfVGCC₁₉₆₈, having a coding strand with SEQ ID NO:1910 and a complementary strand with SEQ ID NO:1911. Sequence analysis also revealed that nucleic acid molecule nCfVGCC₁₉₆₈ does not encode a start codon, thus, a second 5′ RACE PCR was performed as follows in order to isolate additional sequence. Adapter Primer 1 was used as the forward primer in conjunction with reverse primer VGCC-R4 primer which is complementary to nucleotides 350-372 of SEQ ID NO:1910, having a nucleic acid sequence 5′ CCC GCC CCA GTT CTA GGT TOT CC 3′, denoted herein as SEQ ID NO:1950, using the RACE cDNA pool prepared as described in Example 3 as the template, and the PCR reaction and thermocycling conditions as described for the first PCR reaction. The products of this reaction were then diluted 1:50 in water and used as the template in a second PCR reaction with Adapter Primer 2 as the forward primer in conjunction with reverse primer VGCC-R2, which is complementary to nucleotides 134-153 of SEQ ID NO:1910, having a nucleic acid sequence 5′ CAC ACC CAA CCT GAC CAG GC 3′, denoted herein as SEQ ID NO:1951, under the PCR reaction and thermocycling conditions as described for the first PCR reaction.

[0357] The products of this reaction were gel purified as previously described and the fragment was ligated into the pCR II TA CLONING® vector, available from Qiagen, and sequenced to reveal of fragment of approximately 673 nucleotides in length, referred to herein as nCfVGCC₆₇₃, having a coding strand with SEQ ID NO:1912 and a complementary strand with SEQ ID NO:1913. Sequence analysis revealed that nucleotides 520-673 of the fragment had 100% identity with nucleotides 1-154 of SEQ ID NO:1910. The VGCC fragments were aligned to form a contiguous sequence that is 3126 nucleotides in length, referred to herein as nCfVGCC₃₁₂₆, having a coding strand with SEQ ID NO:1914 and a complementary strand with SEQ ID NO:1916. Translation of SEQ ID NO:1914 suggests that nucleic acid molecule nCfVGCC₃₁₂₆ encodes a full-length VGCC-like protein of 851 amino acids, referred to herein as PCfVGCC₈₅₁, having an amino acid sequence represented by SEQ ID NO:1915, assuming the initiation codon spans from nucleotide 168 through nucleotide 170 of SEQ ID NO:1914 and the termination codon spans from nucleotide 2721 through nucleotide 2723 of SEQ ID NO:1914. The coding region encoding PCfVGCC₈₅₁ is represented by nucleic acid molecule nCfVGCC₂₅₅₃, having a coding strand with the nucleic acid sequence represented by SEQ ID NO:1917 and a complementary strand with nucleic acid sequence represented by SEQ ID NO:1918. The amino acid sequence of SEQ ID NO:1915, predicts that PCfVGCC₈₅, has an estimated molecular weight of about 93.4 kDa and an estimated pI of about 7.35.

[0358] Comparison of amino acid sequence SEQ ID NO:1915 with amino acid sequences reported in GENBANK® indicates that SEQ ID NO:1915 showed the most homology, i.e., about 63.1% identity, with a Oryctolagus cuniculus (rabbit) chloride channel protein 3 (CLCN3) (Accession # AAB95163). Comparison of SEQ ID NO:1914 with nucleic acid sequences reported in GENBANK® indicates that SEQ ID NO:1914 showed the most homology, i.e., about 61.3% identity, with a Oryctolagus cuniculus chloride channel protein 3 (CLCN3) mRNA (Accession # AF029348). Percent identity calculations were performed using GCG® version 9.0 using default parameters.

[0359] A Northern Blot analysis was conducted as described in Example 4 to determine whether VGCC mRNA is expressed only in certain life stages of the flea life cycle and whether VGCC mRNA is expressed only in HMT tissue. Total RNA was extracted from eggs, first, third, and wandering larvae, pupae, unfed adults, and adults fed on cat blood for 0.25, 2, 8, and 24 hours. In addition, total RNA was extracted from hindguts and Malpighian tubules extracted from 24 hour cat blood-fed adult fleas, and from the remaining body parts following the removal of hindguts and Malpighian tubules. Each RNA sample was separated by gel electrophoresis, transferred to nylon membranes and hybridized with α-³²P-ATP labeled nCfVGCC₃₈₁ under the Northern Blotting conditions described in Example 4. An approximately 3 kB band was detected in all lifestages and adult unfed and fed timepoints, however, the intensity of the signal did vary between stages with the strongest signals seen in the egg, unfed adult, and 0.25 hour fed adult stages, and the weakest signals seen in the 3rd instar larval and pupal stages. A strong signal was detectable in the 24 hour fed adult HMT tissues, but only a very weak signal was present in the carcass tissues.

### Example 20

[0360] This Example describes the further characterization and expression of an Intersectin-like cDNA isolated by EST sequencing described in Example 2.

[0361] A cDNA designated clone 2225-23 was isolated from the unsubtracted HNC library as described in Example 2, denoted herein as SEQ ID NO:121. A Northern Blot analysis was conducted as described in Example 10 to determine whether clone 2225-23 mRNA is expressed exclusively in HNC tissues. For the hybridization step, a probe comprising the flea clone 2225-23 nucleic acid molecule was labeled with α-³²P-ATP using a DNA labeling kit, available from Amersham and added to the buffer at a concentration of approximately 1×10⁶ cpm/ml, and allowed to hybridize for about 14 to 18 hours at 42° C. The blot was then washed twice for 10 minutes per wash in 0.5×SSPE and 0.1% sarcosyl at 55° C. and exposed to film for autoradiography. Analysis of the developed film showed that there was greater expression of clone 2225-23 mRNA in HNC tissues compared to non-HNC tissues, indicating possible upregulation of clone 2225-23 in flea head and nerve cords.

### Example 21

[0362] This Example describes the further characterization and expression of an Neuroendocrine Specific Protein C-like cDNA isolated by EST sequencing described in Example 2.

[0363] A cDNA designated clone 2249-19 was isolated from the unsubtracted HNC library as described in Example 2, denoted herein as SEQ ID NO:1775. A Northern Blot analysis was conducted as described in Example 10 to determine whether clone 2249-19 mRNA is expressed exclusively in HNC tissues. For the hybridization step, a probe having the nucleic acid sequence of clone 2249-19 was generated as follows. A PCR reaction was conducted using forward primer 2249-19for, having a nucleotide sequence 5′ AGT CGC ATA GTG CAC TTC TGA ATG 3′, denoted herein as SEQ ID NO:1954, and reverse primer 2249-19rev, having a nucleotide sequence 5′ CTG ACA TCT GTT TCC ACA GCT C 3′, denoted herein as SEQ ID NO:1955, using the HNC cDNA library prepared as described in Example 2 as the template under standard PCR reaction conditions and the following thermocycling conditions: (1) one minute at 95° C., (2) two cycles of 94° C. for 10 seconds, 50° C. for 20 seconds, and 72° C. for 20 seconds, (3) thirty cycles of 94° C. for 10 sec, 53° C. for 20 sec, 72° C. for 40 sec. The PCR product was ligated into the TA vector using a TA CLONING® kit, available from Invitrogen and the clone was digested with EcoR1 enzyme, and purified from an agarose gel. The purified nucleic acid molecule was labeled with α-³²P-ATP using a DNA labeling kit, available from Amersham and added to the buffer at a concentration of approximately 1×10⁶ cpm/ml, and allowed to hybridize for about 14 to 18 hours at 42° C. The blot was then washed twice for 10 minutes per wash in 0.5×SSPE and 0.1% sarcosyl at 55° C. and exposed to film for autoradiography. Analysis of the developed film showed that there was expression of clone 2249-19 mRNA in HNC tissues and non-HNC tissues with 2 bands evident; one at approximately 1.5 Kb and one at approximately 2.5 Kb.

### Example 22

[0364] This Example describes the further characterization and expression of an anoxia upregulated protein-like cDNA isolated by EST sequencing described in Example 2.

[0365] A TA clone from the HNC EST library described in Example 2 designated clone 2218-95, denoted herein as SEQ ID NO:1858 was sequenced using standard sequencing methods and shown to contain a non-full length nucleic acid molecule having significant homology to anoxia upregulated protein (AUP) genes. Additional sequence encoding an AUP gene was isolated as follows. A hybridization probe containing the nucleic acid sequence of SEQ ID NO:1858 was constructed as follows. A PCR reaction was conducted using forward primer 2218-95for, having a nucleotide sequence 5′ AAT AGT GAT GTT GTA AGA GTT AGG 3′, denoted herein as SEQ ID NO:1956, and reverse primer 2218-95rev, having a nucleotide sequence 5′ GTT TAA TAT TGC ATG TTT ATT CAT TAA AA 3′, denoted herein as SEQ ID NO:1957, using the HNC cDNA library prepared as described in Example 2 as the template under standard PCR reaction conditions and the following thermocycling conditions: (1) one minute at 95° C., (2) thirty cycles of 94° C. for 10 sec, 55° C. for 20 sec, 72° C. for 20 sec. The PCR product was ligated into the TA vector using a TA CLONING® kit, available from Invitrogen and the clone was digested with EcoR1 enzyme, and purified from an agarose gel. The purified nucleic acid molecule was labeled with α-³²P-ATP using a DNA labeling kit, available from Amersham.

[0366] The ³²P α-dATP labeled probe was used in a standard plaque lift hybridization procedure to isolate a clone from the HNC lambda-ZAP unsubtracted cDNA library described in Example 2. Hybridization was conducted as described in Example 12 and a plaque that hybridized strongly to the probe was isolated, purified and sequenced as described in Example 12. Sequencing revealed that the clone contained a nucleic acid molecule of about 1181 nucleotides, referred to herein as nCfAUP₁₁₈₁ having a nucleotide sequence denoted herein as SEQ ID NO:1919. The complement of SEQ ID NO:1919 is represented herein as SEQ ID NO:1921.

[0367] Translation of SEQ ID NO:1919 suggests that nucleic acid molecule nCfAUP₁₁₈₁ encodes a full-length AUP protein of 102 amino acids, referred to herein as PCfAUP₁₀₂, having an amino acid sequence represented by SEQ ID NO:1920, assuming the initiation codon spans from nucleotide 127 through nucleotide 129 of SEQ ID NO:1919 and the termination codon spans from nucleotide 433 through nucleotide 435 of SEQ ID NO:1919. The coding region encoding PCfAUP₁₀₂, is represented by nucleic acid molecule nCfAUP₃₀₆, having a coding strand with the nucleic acid sequence represented by SEQ ID NO:1922 and a complementary strand with nucleic acid sequence represented by SEQ ID NO:1923. The amino acid sequence of PCfAUP₁₀₂ predicts that PCfAUP₁₀₂ has an estimated molecular weight of about 11.9 kDa and an estimated pI of about 10.5.

[0368] Comparison of amino acid sequence SEQ ID NO:1920 with amino acid sequences reported in GENBANK® indicates that SEQ ID NO:1920 showed the most homology, i.e., about 52% identity, with a Drosophila melanogaster anoxia upregulated protein, GENBANK® Accession No. AAD38397. Percent identity calculations were performed using GCG® version 9.0 using default parameters. Blast comparison of nucleic acid sequence SEQ ID NO:1919 with nucleic acid sequences reported in GENBANK® indicates that SEQ ID NO:1919 showed the most homology to a clone from human chromosome 14q31 region containing gene for neurexin III, GENBANK® #AC007056. Pairwise identity could not be performed as the human clone in GENBANK® is too large to load into GCG® version 9.0.

### Example 23

[0369] This Example describes the further characterization of a neuroendocrine specific 7B2 polypeptide, isolated by EST sequencing described in Example 2.

[0370] A cDNA designated clone 2211-21 was isolated from the subtracted HNC library as described in Example 2, denoted herein as SEQ ID NO:92. DNA from clone 2211-21 was purified, and the insert used for plaque hybridization screening of the unsubtracted HMT cDNA library as follows. The insert from clone 2211-21 was excised by digestion with EcoRI, separated by agarose gel electrophoresis and purified using the QIAQUICK® Gel Extraction kit, available from Qiagen. A MEGAPRIME® DNA labeling kit, available from Amersham Pharmacia, was used to incorporate α-³²P-labeled dATP into the random-primed probe mix. The ³²P α-dATP labeled probe was used in a standard plaque lift hybridization procedure to isolate a clone from the HNC lambda-ZAP unsubtracted cDNA library, prepared as described in Example 2. The following hybridization conditions were used. Hybond-N filters, available from Amersham, were hybridized with about 2×10⁶ counts per minute (cpm) per ml of the probe in 50 ml of hybridization solution (5×SSPE, 25 mM EDTA pH 8.0, 5×Denhardt's reagent, 1.2% SDS, 0.020 mg/mL salmon sperm DNA) at 55° C. for about 48 hours. The filters were washed once in 50 mL 4×SSPE, 1% SDS for 15 minutes at 55° C., once in 50 mL 2×SSPE, 1% SDS for 10 minutes at 55° C., and washed twice in 50 mL 0.5×SSPE, 0.5% SDS for 10 minutes at 55° C. The filters were then subjected to autoradiography. One plaque that hybridized strongly to the probe was isolated and subjected to in vivo excision using the Stratagene EX-ASSIST® helper phage system and protocols. Miniprep DNA was prepared from the positive clone using a Miniprep kit and protocol, available from Qiagen, Chatsworth, Calif., and sequenced using standard sequencing procedures. The clone, referred to as nCf7B2₂₁₆₁ contains a nucleic acid molecule of about 2161 nucleotides in length, having a coding strand with nucleic acid sequence SEQ ID NO:1924 and a complementary sequence having SEQ ID NO:1926.

[0371] Translation of SEQ ID NO:1924 suggests that nucleic acid molecule nCf7B2₂₁₆, encodes a full-length 7B2-like protein of 267 amino acids, referred to herein as PCf7B2₂₆₇, having an amino acid sequence represented by SEQ ID NO:1925, assuming the initiation codon spans from nucleotide 107 through nucleotide 109 of SEQ ID NO:1924 and the termination codon spans from nucleotide 908 through nucleotide 910 of SEQ ID NO:1924. The coding region encoding PCf7B2₂₆₇, is represented by nucleic acid molecule nCf7B2₈₀₁, having a coding strand with the nucleic acid sequence represented by SEQ ID NO:1927 and a complementary strand with nucleic acid sequence represented by SEQ ID NO:1928. The amino acid sequence of SEQ ID NO:1925, predicts that PCf7B2₂₆₇ has an estimated molecular weight of about 31 kDa and an estimated pI of about 5. Analysis of PCf7B2₂₆₇ suggests the presence of a signal peptide encoded by a stretch of amino acids spanning from about amino acid 1 through amino acid 20. The proposed mature protein, referred to herein as PCf7B2₂₄₇ contains 247 amino acids, designated SEQ ID NO:1930, and is encoded by a nucleic acid molecule referred to as nCf7B2₇₄, having a coding strand with SEQ ID NO:1929 and a complementary strand with SEQ ID NO:1931.

[0372] Comparison of amino acid sequence SEQ ID NO:1925 with amino acid sequences reported in GENBANK® indicates that SEQ ID NO:1925 showed the most homology, i.e., about 39% identity, with a Drosophila melanogaster protein, GENBANK® Accession No. AAF52036. Percent identity calculations were performed using GCG® version 9.0 using default parameters. Blast comparison of nucleic acid sequence SEQ ID NO:1924 with nucleic acid sequences reported in GENBANK® indicates that SEQ ID NO:1924 showed the most homology to a human chromosome 19, cosmid R28204 clone, GENBANK® #Accession No. AC006132. Pairwise identity could not be performed as the human clone in GENBANK® is too large to load intoGCG® version 9.0, however, the BLAST score was 0.20, which is not considered to be significant level of identity.

[0373] A Northern Blot analysis was conducted as described in Example 10 to determine whether 7B2 mRNA is expressed exclusively in HNC tissues. For the hybridization step, a probe having the nucleic acid sequence of clone 2211-21 was generated as follows. A PCR reaction was conducted using forward primer 2211-21 for, having a nucleotide sequence 5′ GCG CCA TGA AGA TTT CAG GCG 3′, denoted herein as SEQ ID NO:1958, and reverse primer 2211-21rev, having a nucleotide sequence 5′ AAG TGC AAT GAA TCA TCA GCA AG 3′, denoted herein as SEQ ID NO:1959, using the HNC cDNA library prepared as described in Example 2 as the template under standard PCR reaction conditions and the following thermocycling conditions: (1) one minute at 95° C., (2) five cycles of 94° C. for 10 seconds, 50° C. for 20 seconds, and 72° C. for 20 seconds, (3) thirty cycles of 94° C. for 10 sec, 53° C. for 20 see, 72° C. for 40 sec. The PCR product was ligated into the TA vector using a TA CLONING® kit, available from Invitrogen and the clone was digested with EcoRI enzyme, and purified from an agarose gel. The purified nucleic acid molecule was labeled with α-³²P-ATP using a DNA labeling kit, available from Amersham and added to the buffer at a concentration of approximately 1×10⁶ cpm/ml, and allowed to hybridize for about 14 to 18 hours at 42° C. The blot was then washed twice for 10 minutes per wash in 0.5×SSPE and 0.1% sarcosyl at 55° C. and exposed to film for autoradiography. Analysis of the developed film showed that after 2.5 days of exposure clone 2211-21 mRNA was expressed exclusively in HNC tissue.

[0374] While various embodiments of the present invention have been described in detail, it is apparent that modifications and adaptations of those embodiments will occur to those skilled in the art. It is to be expressly understood, however, that such modifications and adaptations are within the scope of the present invention, as set forth in the following claims:

The application's sequence listing, which the Patent Office published only in electronic form, follows.

SEQUENCE LISTING (1959 sequences)

SEQ ID NO: 1 - DNA, 2057 bp, Ctenocephalides felis
  CDS (152)..(1303)
aacataataataacttaataaaattttgtgatcagatttctaatatccagaacaaagccagtaattataagaaccaagcctatttcatgtgaaggttacttctccacagtattattatctatctcaagaagtaatctattactgaatcaaaatgaaaagcagtacctgtatttttcttctggtcattatgctgaattgcaagaaccttgttaatgctgcgtgcaccaacaacgcgcctccaatgaagatattccgtagccgaagagttcttctcggtgatggtactgaaagagatgctggcattgtagttgattcctccggaagaataaaaagtataatttcaggagaagaagtggaaaggatagctaacgaaactaaagttgaggtgttggactacggtcaattttcaatatggccaggtgtgatagactctcatgtgcacgtcaacgaaccaggaagagaatcctgggaaggatacaccacagctactaaagcagcagcttggggcgggattaccacaatagtagacatgcctttgaattccatcccacctacaactactgtagagaatttgagaacaaaagtgaattcagcctgtggtaaaacgcatgttgatgtcgctttctggggaggcgtgattcctggcaatgcgcacgaattgttgccacttatcaacgccggagtaagaggattcaaatgttttacaagtgaaagtggtgtcgatgagtttccacaggttactaaaaatgatctggaaatggctctaaaagagctccagaaagcaaattccgtacttctgtaccatgccgaattacccgctcctcaagaaaatgttacaagcaatgaaactgaaaagtacatgacttacctgaaaacacgacctccaagtatggaagtaaatgctattgatatgattatagacctcacaaaaaaatataaagttaggtctcacatagtgcatctatcagcagcaggtgctttaccgcaattgaaaaaagcgcgctcagagaacgttccactttcgattgaaacttgtcatcattacttaacctttgctgctgaagatgttccagatggacatactgaatacaaatgcgctccaccaattagagaagaaagtaatcaagaaaaattatggcaagctttggaaaacagagatattgatatggtagtcagtgatcattctccatcacctgctgcactgaaaggcctgtgcaatggttgtcatcctgatttcctaaaagcttggggtggaattgctggtatgcagtttggattatctttaataagggaccggtgcttctaaaagaggctttaaagctcatgatgtatctcgtttattatctgcgggacctgcgaaattaactggactggatggcataaaaggacaaatcaaagaaggcttggatgctgatttagtaatttgggatcctgaggaagaatttaaggtcactaaagacataatccaacacaagaataaagaaacaccatacttaggaatgacgttgaagggcaaagttcatgcaactgttgtacgaggagactttgtttaccgtaatggacaaccattcgaaattccaaaaggaaatttacttattgaatgattaaatgtaatagattaatcaaattttagatgattaaaattgttttattactacaatagcaacctctgcctgaaaattaaccgaacaaacttctaacatccttattaatgtatagattttgaataataacatagaaattatactatttttttgatgactctaataaaaaaaatgtataaatggccatgcctgatatatttttgataaccttaatgaaaaaatgtttaaatggccatgtctgaaaagatttctatgtgtatttttttgttaacattttattgttgaatggataaaagataaatacaattttataagctgtttggataaattaattttgaataaatccataatcatagaatatgttaagtagcaaattaaaatatggaccacaaaccacaaaatgtatacgaaatataacttatatgatatatgaaaaaaaaaaaaaaaaaaaaa

SEQ ID NO: 2 - protein, 384 aa, Ctenocephalides felis
MKSSTCIFLLVIMLNCKNLVNAACTNNAPPMKIFRSRRVLLGDGTERDAGIVVDSSGRIKSIISGEEVERIANETKVEVLDYGQFSIWPGVIDSHVHVNEPGRESWEGYTTATKAAAWGGITTIVDMPLNSIPPTTTVENLRTKVNSACGKTHVDVAFWGGVIPGNAHELLPLINAGVRGFKCFTSESGVDEFPQVTKNDLEMALKELQKANSVLLYHAELPAPQENVTSNETEKYMTYLKTRPPSMEVNAIDMIIDLTKKYKVRSHIVHLSAAGALPQLKKARSENVPLSIETCHHYLTFAAEDVPDGHTEYKCAPPIREESNQEKLWQALENRDIDMVVSDHSPSPAALKGLCNGCHPDFLKAWGGIAGMQFGLSLIRDRCF

SEQ ID NO: 3 - DNA, 2057 bp, Ctenocephalides felis
tttttttttttttttttttttcatatatcatataagttatatttcgtatacattttgtggtttgtggtccatattttaatttgctacttaacatattctatgattatggatttattcaaaattaatttatccaaacagcttataaaattgtatttatcttttatccattcaacaataaaatgttaacaaaaaaatacacatagaaatcttttcagacatggccatttaaacattttttcattaaggttatcaaaaatatatcaggcatggccatttatacattttttttattagagtcatcaaaaaaatagtataatttctatgttattattcaaaatctatacattaataaggatgttagaagtttgttcggttaattttcaggcagaggttgctattgtagtaataaaacaattttaatcatctaaaatttgattaatctattacatttaatcattcaataagtaaatttccttttggaatttcgaatggttgtccattacggtaaacaaagtctcctcgtacaacagttgcatgaactttgcccttcaacgtcattcctaagtatggtgtttctttattcttgtgttggattatgtctttagtgaccttaaattcttcctcaggatcccaaattactaaatcagcatccaagccttctttgatttgtccttttatgccatccagtccagttaatttcgcaggtcccgcagataataaacgagatacatcatgagctttaaagcctcttttagaagcaccggtcccttattaaagataatccaaactgcataccagcaattccaccccaagcttttaggaaatcaggatgacaaccattgcacaggcctttcagtgcagcaggtgatggagaatgatcactgactaccatatcaatatctctgttttccaaagcttgccataatttttcttgattactttcttctctaattggtggagcgcatttgtattcagtatgtccatctggaacatcttcagcagcaaaggttaagtaatgatgacaagtttcaatcgaaagtggaacgttctctgagcgcgcttttttcaattgcggtaaagcacctgctgctgatagatgcactatgtgagacctaactttatatttttttgtgaggtctataatcatatcaatagcatttacttccatacttggaggtcgtgttttcaggtaagtcatgtacttttcagtttcattgcttgtaacattttcttgaggagcgggtaattcggcatggtacagaagtacggaatttgctttctggagctcttttagagccatttccagatcatttttagtaacctgtggaaactcatcgacaccactttcacttgtaaaacatttgaatcctcttactccggcgttgataagtggcaacaattcgtgcgcattgccaggaatcacgcctccccagaaagcgacatcaacatgcgttttaccacaggctgaattcacttttgttctcaaattctctacagtagttgtaggtgggatggaattcaaaggcatgtctactattgtggtaatcccgccccaagctgctgctttagtagctgtggtgtatccttcccaggattctcttcctggttcgttgacgtgcacatgagagtctatcacacctggccatattgaaaattgaccgtagtccaacacctcaactttagtttcgttagctatcctttccacttcttctcctgaaattatactttttattcttccggaggaatcaactacaatgccagcatctctttcagtaccatcaccgagaagaactcttcggctacggaatatcttcattggaggcgcgttgttggtgcacgcagcattaacaaggttcttgcaattcagcataatgaccagaagaaaaatacaggtactgcttttcattttgattcagtaatagattacttcttgagatagataataatactgtggagaagtaaccttcacatgaaataggcttggttcttataattactggctttgttctggatattagaaatctgatcacaaaattttattaagttattattatgtt

SEQ ID NO: 4 - DNA, 1152 bp, Ctenocephalides felis
  CDS (1)..(1152)
atgaaaagcagtacctgtatttttcttctggtcattatgctgaattgcaagaaccttgttaatgctgcgtgcaccaacaacgcgcctccaatgaagatattccgtagccgaagagttcttctcggtgatggtactgaaagagatgctggcattgtagttgattcctccggaagaataaaaagtataatttcaggagaagaagtggaaaggatagctaacgaaactaaagttgaggtgttggactacggtcaattttcaatatggccaggtgtgatagactctcatgtgcacgtcaacgaaccaggaagagaatcctgggaaggatacaccacagctactaaagcagcagcttggggcgggattaccacaatagtagacatgcctttgaattccatcccacctacaactactgtagagaatttgagaacaaaagtgaattcagcctgtggtaaaacgcatgttgatgtcgctttctggggaggcgtgattcctggcaatgcgcacgaattgttgccacttatcaacgccggagtaagaggattcaaatgttttacaagtgaaagtggtgtcgatgagtttccacaggttactaaaaatgatctggaaatggctctaaaagagctccagaaagcaaattccgtacttctgtaccatgccgaattacccgctcctcaagaaaatgttacaagcaatgaaactgaaaagtacatgacttacctgaaaacacgacctccaagtatggaagtaaatgctattgatatgattatagacctcacaaaaaaatataaagttaggtctcacatagtgcatctatcagcagcaggtgctttaccgcaattgaaaaaagcgcgctcagagaacgttccactttcgattgaaacttgtcatcattacttaacctttgctgctgaagatgttccagatggacatactgaatacaaatgcgctccaccaattagagaagaaagtaatcaagaaaaattatggcaagctttggaaaacagagatattgatatggtagtcagtgatcattctccatcacctgctgcactgaaaggcctgtgcaatggttgtcatcctgatttcctaaaagcttggggtggaattgctggtatgcagtttggattatctttaataagggaccggtgcttc

SEQ ID NO: 5 - protein, 384 aa, Ctenocephalides felis; identical to SEQ ID NO: 2

SEQ ID NO: 6 - DNA, 1152 bp, Ctenocephalides felis
gaagcaccggtcccttattaaagataatccaaactgcataccagcaattccaccccaagcttttaggaaatcaggatgacaaccattgcacaggcctttcagtgcagcaggtgatggagaatgatcactgactaccatatcaatatctctgttttccaaagcttgccataatttttcttgattactttcttctctaattggtggagcgcatttgtattcagtatgtccatctggaacatcttcagcagcaaaggttaagtaatgatgacaagtttcaatcgaaagtggaacgttctctgagcgcgcttttttcaattgcggtaaagcacctgctgctgatagatgcactatgtgagacctaactttatatttttttgtgaggtctataatcatatcaatagcatttacttccatacttggaggtcgtgttttcaggtaagtcatgtacttttcagtttcattgcttgtaacattttcttgaggagcgggtaattcggcatggtacagaagtacggaatttgctttctggagctcttttagagccatttccagatcatttttagtaacctgtggaaactcatcgacaccactttcacttgtaaaacatttgaatcctcttactccggcgttgataagtggcaacaattcgtgcgcattgccaggaatcacgcctccccagaaagcgacatcaacatgcgttttaccacaggctgaattcacttttgttctcaaattctctacagtagttgtaggtgggatggaattcaaaggcatgtctactattgtggtaatcccgccccaagctgctgctttagtagctgtggtgtatccttcccaggattctcttcctggttcgttgacgtgcacatgagagtctatcacacctggccatattgaaaattgaccgtagtccaacacctcaactttagtttcgttagctatcctttccacttcttctcctgaaattatactttttattcttccggaggaatcaactacaatgccagcatctctttcagtaccatcaccgagaagaactcttcggctacggaatatcttcattggaggcgcgttgttggtgcacgcagcattaacaaggttcttgcaattcagcataatgaccagaagaaaaatacaggtactgcttttcat

SEQ ID NO: 7 - DNA, 1128 bp, Ctenocephalides felis
  CDS (6)..(821)
  misc_feature (1097)..(1098): n = unknown
  misc_feature (1121)..(1121): n = unknown
tcacaatgaagttcttaggagctttattggttgcagtgtttgccttgggtgctgtggctgctgacaggaattcgcccacatatgtccgcggtttcccagtgggaagatccagagcacgaacaacatttggcaatgaagaaataaagtgtactaataagcagttgggaacattttgtcacgattgttctactttgaagttgtgcgctggacaagaaaccccaattacaacaatcaattgcagagactcaaattccgatgctccattttgtgtagatgatatgtgctcatcaaaacctggggaaaactgtaagacggcagaaactacatgcgccgttgtaggatatcagccagatccgaaagactgcacaagatacttattctgcaaagatggtaaaggtcaggttttcgaatgcccacctaactatgtatatgatcattctaaaaatatgtgtaaaaagaaatcgtcagaagctgattgcaccgtcatgaaatgcacaaatcccaattcttttataacctatgcaccggacccatcaatttatgcttggtgcaatgacaaattgcaaccgatcgtactgaaatgtgaagacgacgtcaacgaatggtttgacccaaaatctttctcgtgcagaactgcatgcaaaagtgaaaacgttttttccgatcgaagagattgtaaaaaatattatcaatgtttcttggttaacaacaaatggcaaataaaacattatgattgtccaaatggcttgcactttgataaaacggagttgcgatgcatacccacgccacccggcgaagaatgcaaaagtgagattgctaagtaaggcttaaaccaggaaaacaatcttgaatagactaattaggattcaaattatcataaagtagtcaattaatataataaatacacaaatgatctgtgcaattaaatataaaaaatatgtttaaaaattaaaatgtataaaattgtattttatgtaaggagcacaaacaaaatgtccttaactatagtaatttctgattatttaaaatatataaatatagaagctttatgaaattacatgtatctttttaataaaaataaatcgtttgggccgttnnaaaaaaaaaaaaaaaaaaaaaanaaaaaaa

SEQ ID NO: 8 - protein, 272 aa, Ctenocephalides felis
MKFLGALLVAVFALGAVAADRNSPTYVRGFPVGRSRARTTFGNEEIKCTNKQLGTFCHDCSTLKLCAGQETPITTINCRDSNSDAPFCVDDMCSSKPGENCKTAETTCAVVGYQPDPKDCTRYLFCKDGKGQVFECPPNYVYDHSKNMCKKKSSEADCTVMKCTNPNSFITYAPDPSIYAWCNDKLQPIVLKCEDDVNEWFDPKSFSCRTACKSENVFSDRRDCKKYYQCFLVNNKWQIKHYDCPNGLHFDKTELRCIPTPPGEECKSEIAK

SEQ ID NO: 9 - DNA, 1128 bp, Ctenocephalides felis
  misc_feature (8)..(8): n = unknown
  misc_feature (31)..(32): n = unknown
tttttttnttttttttttttttttttttttnnaacggcccaaacgatttatttttattaaaaagatacatgtaatttcataaagcttctatatttatatattttaaataatcagaaattactatagttaaggacattttgtttgtgctccttacataaaatacaattttatacattttaatttttaaacatattttttatatttaattgcacagatcatttgtgtatttattatattaattgactactttatgataatttgaatcctaattagtctattcaagattgttttcctggtttaagccttacttagcaatctcacttttgcattcttcgccgggtggcgtgggtatgcatcgcaactccgttttatcaaagtgcaagccatttggacaatcataatgttttatttgccatttgttgttaaccaagaaacattgataatattttttacaatctcttcgatcggaaaaaacgttttcacttttgcatgcagttctgcacgagaaagattttgggtcaaaccattcgttgacgtcgtcttcacatttcagtacgatcggttgcaatttgtcattgcaccaagcataaattgatgggtccggtgcataggttataaaagaattgggatttgtgcatttcatgacggtgcaatcagcttctgacgatttctttttacacatatttttagaatgatcatatacatagttaggtgggcattcgaaaacctgacctttaccatctttgcagaataagtatcttgtgcagtctttcggatctggctgatatcctacaacggcgcatgtagtttctgccgtcttacagttttccccaggttttgatgagcacatatcatctacacaaaatggagcatcggaatttgagtctctgcaattgattgttgtaattggggtttcttgtccagcgcacaacttcaaagtagaacaatcgtgacaaaatgttcccaactgcttattagtacactttatttcttcattgccaaatgttgttcgtgctctggatcttcccactgggaaaccgcggacatatgtgggcgaattcctgtcagcagccacagcacccaaggcaaacactgcaaccaataaagctcctaagaacttcattgtga

SEQ ID NO: 10 - DNA, 816 bp, Ctenocephalides felis
  CDS (1)..(816)
atgaagttcttaggagctttattggttgcagtgtttgccttgggtgctgtggctgctgacaggaattcgcccacatatgtccgcggtttcccagtgggaagatccagagcacgaacaacatttggcaatgaagaaataaagtgtactaataagcagttgggaacattttgtcacgattgttctactttgaagttgtgcgctggacaagaaaccccaattacaacaatcaattgcagagactcaaattccgatgctccattttgtgtagatgatatgtgctcatcaaaacctggggaaaactgtaagacggcagaaactacatgcgccgttgtaggatatcagccagatccgaaagactgcacaagatacttattctgcaaagatggtaaaggtcaggttttcgaatgcccacctaactatgtatatgatcattctaaaaatatgtgtaaaaagaaatcgtcagaagctgattgcaccgtcatgaaatgcacaaatcccaattcttttataacctatgcaccggacccatcaatttatgcttggtgcaatgacaaattgcaaccgatcgtactgaaatgtgaagacgacgtcaacgaatggtttgacccaaaatctttctcgtgcagaactgcatgcaaaagtgaaaacgttttttccgatcgaagagattgtaaaaaatattatcaatgtttcttggttaacaacaaatggcaaataaaacattatgattgtccaaatggcttgcactttgataaaacggagttgcgatgcatacccacgccacccggcgaagaatgcaaaagtgagattgctaag

SEQ ID NO: 11 - protein, 272 aa, Ctenocephalides felis; identical to SEQ ID NO: 8

SEQ ID NO: 12 - DNA, 816 bp, Ctenocephalides felis
cttagcaatctcacttttgcattcttcgccgggtggcgtgggtatgcatcgcaactccgttttatcaaagtgcaagccatttggacaatcataatgttttatttgccatttgttgttaaccaagaaacattgataatattttttacaatctcttcgatcggaaaaaacgttttcacttttgcatgcagttctgcacgagaaagattttgggtcaaaccattcgttgacgtcgtcttcacatttcagtacgatcggttgcaatttgtcattgcaccaagcataaattgatgggtccggtgcataggttataaaagaattgggatttgtgcatttcatgacggtgcaatcagcttctgacgatttctttttacacatatttttagaatgatcatatacatagttaggtgggcattcgaaaacctgacctttaccatctttgcagaataagtatcttgtgcagtctttcggatctggctgatatcctacaacggcgcatgtagtttctgccgtcttacagttttccccaggttttgatgagcacatatcatctacacaaaatggagcatcggaatttgagtctctgcaattgattgttgtaattggggtttcttgtccagcgcacaacttcaaagtagaacaatcgtgacaaaatgttcccaactgcttattagtacactttatttcttcattgccaaatgttgttcgtgctctggatcttcccactgggaaaccgcggacatatgtgggcgaattcctgtcagcagccacagcacccaaggcaaacactgcaaccaataaagctcctaagaacttcat

SEQ ID NO: 13 - DNA, 1714 bp, Ctenocephalides felis
  CDS (294)..(1271)
atcgcaagtatcgggtgccgcgttcaaatttacacccggggcctcttcacgatttttctccgtgacacaaattatgaccagtgatccgaaacaaatctctacctgaactacccacatgttattcagtgaactaaacaaatttccttacccagaatacaacataagaactaacgatttgaactgtttataattcataatataaccgcatcttttatttctaattttatcttttagtgaataaatttatttgttgttgaataaattaataattgtgtacgttcaatttgttcgtgatggagaaaatagttggacgcgatggaacagaagtcatcacatacgagtttccatatatgaggagagcggataagcggactaactgggaaaagttccggcagggatgctacaatccggacgagggcagttttttgggcaggcaaccatcagcatgggctcgcgtatcgctattttacttggtattctacacagttttggcatccctattcacaatatgcatgtacacaatgctatctacgatagacaaggaatacccaaaatggcagcttgaggattcaataataggaactaatcctggactgggatttaggccaatagcagataacacagaagagggatctctaatatggttcgacgccaaaaatgaaactgaagttgcgaaatggacaacaataattgacgaatttttagctccttacaaaaatcggtctcaattgccaagccacggtgaaaatcaaatgttctgcgactacgaaacggggcccaacactgcaaatcgtgtttgtgccgtagccgtcgagaagtggggctcatgcacatcacaggctaactacggctttggacaatccgcaccttgtgtctttcttaagcttaacaggatatataattgggtaccagattattatgatgatgtggcgacgctgcctgaagatatgcctatggaattgaaggatcacatacaaagtctcaagccggatgagagaaaacaaatttgggtttcgtgtcaaggagaaaatccagttgatcgagaaaatttgggcccagttgaaatgtatccaagcatgggatttgctggatattattatccattcagaaaccaacgagattatcttagtccattagttgctgttcaattcaaaagacctacagtgggacgtttgatcaacgtggaatgtcgtgcctgggccaggaacatcatctatcgtggtggcaacaaggatcgacaaggatccgtccatttcgaactgatgattgattagaatcgacattattagtgttaattttactttattgatatcctaagcattatcgttctgtgttatcgcgccttgtacatcgttgcaaaatagctcgtacgtcgatgttgtgaatagaatttaagttttaattttaagtatgataattaatgaagtgtttaataaatcaaaatgaactttgagtataatagactttatatttatatctaaataaagtttacgcggttttgttatcattaaaggtgtaagattttaatatttataattgtttatatattagctataaatgtgtaaatatacgttatttaatatagtacaaaacaagttgatttatttaatgcctattgtgaaatatgttagtgtagtataaaatgcttatattttattatgtatttagaaaatatattacatttacttattactttaaaaaaaaaaaaaaaaaa

SEQ ID NO: 14 - protein, 326 aa, Ctenocephalides felis
MEKIVGRDGTEVITYEFPYMRRADKRTNWEKFRQGCYNPDEGSFLGRQPSAWARVSLFYLVFYTVLASLFTICMYTMLSTIDKEYPKWQLEDSIIGTNPGLGFRPIADNTEEGSLIWFDAKNETEVAKWTTIIDEFLAPYKNRSQLPSHGENQMFCDYETGPNTANRVCAVAVEKWGSCTSQANYGFGQSAPCVFLKLNRIYNWVPDYYDDVATLPEDMPMELKDHIQSLKPDERKQIWVSCQGENPVDRENLGPVEMYPSMGFAGYYYPFRNQRDYLSPLVAVQFKRPTVGRLINVECRAWARNIIYRGGNKDRQGSVHFELMID

SEQ ID NO: 15 - DNA, 1714 bp, Ctenocephalides felis
ttttttttttttttttttaaagtaataagtaaatgtaatatattttctaaatacataataaaatataagcattttatactacactaacatatttcacaataggcattaaataaatcaacttgttttgtactatattaaataacgtatatttacacatttatagctaatatataaacaattataaatattaaaatcttacacctttaatgataacaaaaccgcgtaaactttatttagatataaatataaagtctattatactcaaagttcattttgatttattaaacacttcattaattatcatacttaaaattaaaacttaaattctattcacaacatcgacgtacgagctattttgcaacgatgtacaaggcgcgataacacagaacgataatgcttaggatatcaataaagtaaaattaacactaataatgtcgattctaatcaatcatcagttcgaaatggacggatccttgtcgatccttgttgccaccacgatagatgatgttcctggcccaggcacgacattccacgttgatcaaacgtcccactgtaggtcttttgaattgaacagcaactaatggactaagataatctcgttggtttctgaatggataataatatccagcaaatcccatgcttggatacatttcaactgggcccaaattttctcgatcaactggattttctccttgacacgaaacccaaatttgttttctctcatccggcttgagactttgtatgtgatccttcaattccataggcatatcttcaggcagcgtcgccacatcatcataataatctggtacccaattatatatcctgttaagcttaagaaagacacaaggtgcggattgtccaaagccgtagttagcctgtgatgtgcatgagccccacttctcgacggctacggcacaaacacgatttgcagtgttgggccccgtttcgtagtcgcagaacatttgattttcaccgtggcttggcaattgagaccgatttttgtaaggagctaaaaattcgtcaattattgttgtccatttcgcaacttcagtttcatttttggcgtcgaaccatattagagatccctcttctgtgttatctgctattggcctaaatcccagtccaggattagttcctattattgaatcctcaagctgccattttgggtattccttgtctatcgtagatagcattgtgtacatgcatattgtgaatagggatgccaaaactgtgtagaataccaagtaaaatagcgatacgcgagcccatgctgatggttgcctgcccaaaaaactgccctcgtccggattgtagcatccctgccggaacttttcccagttagtccgcttatccgctctcctcatatatggaaactcgtatgtgatgacttctgttccatcgcgtccaactattttctccatcacgaacaaattgaacgtacacaattattaatttattcaacaacaaataaatttattcactaaaagataaaattagaaataaaagatgcggttatattatgaattataaacagttcaaatcgttagttcttatgttgtattctgggtaaggaaatttgtttagttcactgaataacatgtgggtagttcaggtagagatttgtttcggatcactggtcataatttgtgtcacggagaaaaatcgtgaagaggccccgggtgtaaatttgaacgcggcacccgatacttgcgat

SEQ ID NO: 16 - DNA, 978 bp, Ctenocephalides felis
  CDS (1)..(978)
atggagaaaatagttggacgcgatggaacagaagtcatcacatacgagtttccatatatgaggagagcggataagcggactaactgggaaaagttccggcagggatgctacaatccggacgagggcagttttttgggcaggcaaccatcagcatgggctcgcgtatcgctattttacttggtattctacacagttttggcatccctattcacaatatgcatgtacacaatgctatctacgatagacaaggaatacccaaaatggcagcttgaggattcaataataggaactaatcctggactgggatttaggccaatagcagataacacagaagagggatctctaatatggttcgacgccaaaaatgaaactgaagttgcgaaatggacaacaataattgacgaatttttagctccttacaaaaatcggtctcaattgccaagccacggtgaaaatcaaatgttctgcgactacgaaacggggcccaacactgcaaatcgtgtttgtgccgtagccgtcgagaagtggggctcatgcacatcacaggctaactacggctttggacaatccgcaccttgtgtctttcttaagcttaacaggatatataattgggtaccagattattatgatgatgtggcgacgctgcctgaagatatgcctatggaattgaaggatcacatacaaagtctcaagccggatgagagaaaacaaatttgggtttcgtgtcaaggagaaaatccagttgatcgagaaaatttgggcccagttgaaatgtatccaagcatgggatttgctggatattattatccattcagaaaccaacgagattatcttagtccattagttgctgttcaattcaaaagacctacagtgggacgtttgatcaacgtggaatgtcgtgcctgggccaggaacatcatctatcgtggtggcaacaaggatcgacaaggatccgtccatttcgaactgatgattgat

SEQ ID NO: 17 - protein, 326 aa, Ctenocephalides felis; identical to SEQ ID NO: 14

SEQ ID NO: 18 - DNA, 978 bp, Ctenocephalides felis
atcaatcatcagttcgaaatggacggatccttgtcgatccttgttgccaccacgatagatgatgttcctggcccaggcacgacattccacgttgatcaaacgtcccactgtaggtcttttgaattgaacagcaactaatggactaagataatctcgttggtttctgaatggataataatatccagcaaatcccatgcttggatacatttcaactgggcccaaattttctcgatcaactggattttctccttgacacgaaacccaaatttgttttctctcatccggcttgagactttgtatgtgatccttcaattccataggcatatcttcaggcagcgtcgccacatcatcataataatctggtacccaattatatatcctgttaagcttaagaaagacacaaggtgcggattgtccaaagccgtagttagcctgtgatgtgcatgagccccacttctcgacggctacggcacaaacacgatttgcagtgttgggccccgtttcgtagtcgcagaacatttgattttcaccgtggcttggcaattgagaccgatttttgtaaggagctaaaaattcgtcaattattgttgtccatttcgcaacttcagtttcatttttggcgtcgaaccatattagagatccctcttctgtgttatctgctattggcctaaatcccagtccaggattagttcctattattgaatcctcaagctgccattttgggtattccttgtctatcgtagatagcattgtgtacatgcatattgtgaatagggatgccaaaactgtgtagaataccaagtaaaatagcgatacgcgagcccatgctgatggttgcctgcccaaaaaactgccctcgtccggattgtagcatccctgccggaacttttcccagttagtccgcttatccgctctcctcatatatggaaactcgtatgtgatgacttctgttccatcgcgtccaactattttctccat

SEQ ID NO: 19 - DNA, 2240 bp, Ctenocephalides felis
  CDS (1)..(1707)
acaattttaaacgcatccacgaccgttgaaaaaaatcctggacatcaaaccagtatttcagaagaatctaccacaaaattggtaaaaacaaccactgaagacaaccacctcggtgtaaagagcctgaatgaacctggtgatgaacaagaattaaaaaaaccatcatcacatggtaaggagcatatttctttaccagtggcttcaccagtaccaccagtatcgcatatcttccaggctacaccaggagacctttgtccagccttcgacgatgcagatcgcttcacccagacagaacttttgtccaggctgacaaacgattgcaggtacgataagctggagcgccctttggggcctcacaatggtgcagggccgctcccggtggccgccagaatttacgtgtattttatacaaaatacggacgcgcacgaattgtcattttccgtgaccgtcctcctccaatttcgttacccaggacgccagattggcctacaaaaaagtggcacccacccaggacggtcatcatgggcgaatcgcagctcagggacaaaatctgggtacccacatgtattcgttgccaacgagagatcttcccaggttatgggcacagatgcccaatctaaggacatgttggtgtcagtagctcctgatggtacagtcgtcttttcggtcaggatgaaggcaactttgtactgttggatgaatttaaggaaatttccttttgatgaacaacagtgtcagatgatgttggaaagttggaagtacaatacaagtgaactcctattgacttgggaaccaactgcaccagtaactttagcaccagaactacatttgaccgaatatgtccttactgacatgtgggtaaatgaaacagttgtcaaggctgatttggatgacctgagacacggagcatttggtgggacatacagtgccttaagtttcacgattcaaataagtcgtgaaatgggttactatttaatggattactttttgccatcagtaatgatcgtgtcgtgttcctgggtaagtttttggctggcagcagaccaatcagcacccagagtcaccttaggtacaagcaccatgttatcatttatcactttagcaagtgcccaaggaaaaactttacccaaagtatcgtacatcaaagcttcagaaatctggtttttaggttgcaccgggtttatttttgggagtttagtggaattcgcgtttgtcaacacaatttggagacgaaggaaaaatgtggaattgaaaaaagtcaacagcaagtatattttgaagtcaactttgacgccgaggttggcccggaaggagtttcatgcttcgtttaattcgaatcctggaggtggtaataaggatgatcaggatttgggaagagggattagggtctttccgccgcctttggtcaaggctaggtcttgttccagtctggataggagtaatggatccgggaattttttgagcgtccatggaaatgatcacaaagttccaacaataacagcacaatgtgcagacgatgccgcaagtgaccagatttcagtttgtgtcgatggggaaaacgaagaacctgcacaaattgttcaccacacctggacgacgatgacacctcaagaaatttccatgtggattgacaaaaggtccagaatttgtttcccgatagcttttgctatatttaactttttttattggatatttgtttattatttataaacacacttaatatacttatagttttaataattaataaatttataaaataattaaaaataaatatatgtaaaatttaaaggaaacgtgaatagaatcaaaagagattcttattggattattccattattaataggattcttactagacaatattaatgattttatattatatatcacttataacttttgaacggtttgttaaaaatgaatacaatatttgacaaatttatataaaattaaacaatttataatattgtcgaacatcttaccaccctacagcgactcagtatactcgaaaatcgctattgaaatatcttacacaatttagtcattcctatttcacatataatagttaataattaaaattgaaattttaaattaaaaaataatgatactggaaattttaattttaattattaattattatatgaataattaattttactgcatagttataattataattataaatattaaatttttagaataaatactcagctggtctgaaaaaaaaaaaaaaaaaaaaaaaaa

SEQ ID NO: 20 - protein, 569 aa, Ctenocephalides felis
TILNASTTVEKNPGHQTSISEESTTKLVKTTTEDNHLGVKSLNEPGDEQELKKPSSHGKEHISLPVASPVPPVSHIFQATPGDLCPAFDDADRFTQTELLSRLTNDCRYDKLERPLGPHNGAGPLPVAARIYVYFIQNTDAHELSFSVTVLLQFRYPGRQIGLQKSGTHPGRSSWANRSSGTKSGYPHVFVANERSSQVMGTDAQSKDMLVSVAPDGTVVFSVRMKATLYCWMNLRKFPFDEQQCQMMLESWKYNTSELLLTWEPTAPVTLAPELHLTEYVLTDMWVNETVVKADLDDLRHGAFGGTYSALSFTIQISREMGYYLMDYFLPSVMIVSCSWVSFWLAADQSAPRVTLGTSTMLSFITLASAQGKTLPKVSYIKASEIWFLGCTGFIFGSLVEFAFVNTIWRRRKNVELKKVNSKYILKSTLTPRLARKEFHASFNSNPGGGNKDDQDLGRGIRVFPPPLVKARSCSSLDRSNGSGNFLSVHGNDHKVPTITAQCADDAASDQISVCVDGENEEPAQIVHHTWTTMTPQEISMWIDKRSRICFPIAFAIFNFFYWIFVYYL

SEQ ID NO: 21 - DNA, 2240 bp, Ctenocephalides felis
tttttttttttttttttttttttttcagaccagctgagtatttattctaaaaatttaatatttataattataattataactatgcagtaaaattaattattcatataataattaataattaaaattaaaatttccagtatcattattttttaatttaaaatttcaattttaattattaactattatatgtgaaataggaatgactaaattgtgtaagatatttcaatagcgattttcgagtatactgagtcgctgtagggtggtaagatgttcgacaatattataaattgtttaattttatataaatttgtcaaatattgtattcatttttaacaaaccgttcaaaagttataagtgatatataatataaaatcattaatattgtctagtaagaatcctattaataatggaataatccaataagaatctcttttgattctattcacgtttcctttaaattttacatatatttatttttaattattttataaatttattaattattaaaactataagtatattaagtgtgtttataaataataaacaaatatccaataaaaaaagttaaatatagcaaaagctatcgggaaacaaattctggaccttttgtcaatccacatggaaatttcttgaggtgtcatcgtcgtccaggtgtggtgaacaatttgtgcaggttcttcgttttccccatcgacacaaactgaaatctggtcacttgcggcatcgtctgcacattgtgctgttattgttggaactttgtgatcatttccatggacgctcaaaaaattcccggatccattactcctatccagactggaacaagacctagccttgaccaaaggcggcggaaagaccctaatccctcttcccaaatcctgatcatccttattaccacctccaggattcgaattaaacgaagcatgaaactccttccgggccaacctcggcgtcaaagttgacttcaaaatatacttgctgttgacttttttcaattccacatttttccttcgtctccaaattgtgttgacaaacgcgaattccactaaactcccaaaaataaacccggtgcaacctaaaaaccagatttctgaagctttgatgtacgatactttgggtaaagtttttccttgggcacttgctaaagtgataaatgataacatggtgcttgtacctaaggtgactctgggtgctgattggtctgctgccagccaaaaacttacccaggaacacgacacgatcattactgatggcaaaaagtaatccattaaatagtaacccatttcacgacttatttgaatcgtgaaacttaaggcactgtatgtcccaccaaatgctccgtgtctcaggtcatccaaatcagccttgacaactgtttcatttacccacatgtcagtaaggacatattcggtcaaatgtagttctggtgctaaagttactggtgcagttggttcccaagtcaataggagttcacttgtattgtacttccaactttccaacatcatctgacactgttgttcatcaaaaggaaatttccttaaattcatccaacagtacaaagttgccttcatcctgaccgaaaagacgactgtaccatcaggagctactgacaccaacatgtccttagattgggcatctgtgcccataacctgggaagatctctcgttggcaacgaatacatgtgggtacccagattttgtccctgagctgcgattcgcccatgatgaccgtcctgggtgggtgccacttttttgtaggccaatctggcgtcctgggtaacgaaattggaggaggacggtcacggaaaatgacaattcgtgcgcgtccgtattttgtataaaatacacgtaaattctggcggccaccgggagcggccctgcaccattgtgaggccccaaagggcgctccagcttatcgtacctgcaatcgtttgtcagcctggacaaaagttctgtctgggtgaagcgatctgcatcgtcgaaggctggacaaaggtctcctggtgtagcctggaagatatgcgatactggtggtactggtgaagccactggtaaagaaatatgctccttaccatgtgatgatggtttttttaattcttgttcatcaccaggttcattcaggctctttacaccgaggtggttgtcttcagtggttgtttttaccaattttgtggtagattcttctgaaatactggtttgatgtccaggatttttttcaacggtcgtggatgcgtttaaaattgt

SEQ ID NO: 22 - DNA, 1707 bp, Ctenocephalides felis
  CDS (1)..(1707)
acaattttaaacgcatccacgaccgttgaaaaaaatcctggacatcaaaccagtatttcagaagaatctaccacaaaattggtaaaaacaaccactgaagacaaccacctcggtgtaaagagcctgaatgaacctggtgatgaacaagaattaaaaaaaccatcatcacatggtaaggagcatatttctttaccagtggcttcaccagtaccaccagtatcgcatatcttccaggctacaccaggagacctttgtccagccttcgacgatgcagatcgcttcacccagacagaacttttgtccaggctgacaaacgattgcaggtacgataagctggagcgccctttggggcctcacaatggtgcagggccgctcccggtggccgccagaatttacgtgtattttatacaaaatacggacgcgcacgaattgtcattttccgtgaccgtcctcctccaatttcgttacccaggacgccagattggcctacaaaaaagtggcacccacccaggacggtcatcatgggcgaatcgcagctcagggacaaaatctgggtacccacatgtattcgttgccaacgagagatcttcccaggttatgggcacagatgcccaatctaaggacatgttggtgtcagtagctcctgatggtacagtcgtcttttcggtcaggatgaaggcaactttgtactgttggatgaatttaaggaaatttccttttgatgaacaacagtgtcagatgatgttggaaagttggaagtacaatacaagtgaactcctattgacttgggaaccaactgcaccagtaactttagcaccagaactacatttgaccgaatatgtccttactgacatgtgggtaaatgaaacagttgtcaaggctgatttggatgacctgagacacggagcatttggtgggacatacagtgccttaagtttcacgattcaaataagtcgtgaaatgggttactatttaatggattactttttgccatcagtaatgatcgtgtcgtgttcctgggtaagtttttggctggcagcagaccaatcagcacccagagtcaccttaggtacaagcaccatgttatcatttatcactttagcaagtgcccaaggaaaaactttacccaaagtatcgtacatcaaagcttcagaaatctggtttttaggttgcaccgggtttatttttgggagtttagtggaattcgcgtttgtcaacacaatttggagacgaaggaaaaatgtggaattgaaaaaagtcaacagcaagtatattttgaagtcaactttgacgccgaggttggcccggaaggagtttcatgcttcgtttaattcgaatcctggaggtggtaataaggatgatcaggatttgggaagagggattagggtctttccgccgcctttggtcaaggctaggtcttgttccagtctggataggagtaatggatccgggaattttttgagcgtccatggaaatgatcacaaagttccaacaataacagcacaatgtgcagacgatgccgcaagtgaccagatttcagtttgtgtcgatggggaaaacgaagaacctgcacaaattgttcaccacacctggacgacgatgacacctcaagaaatttccatgtggattgacaaaaggtccagaatttgtttcccgatagcttttgctatatttaactttttttattggatatttgtttattattta

SEQ ID NO: 23 - protein, 569 aa, Ctenocephalides felis; identical to SEQ ID NO: 20

SEQ ID NO: 24 - DNA, 1707 bp, Ctenocephalides felis
taaataataaacaaatatccaataaaaaaagttaaatatagcaaaagctatcgggaaacaaattctggaccttttgtcaatccacatggaaatttcttgaggtgtcatcgtcgtccaggtgtggtgaacaatttgtgcaggttcttcgttttccccatcgacacaaactgaaatctggtcacttgcggcatcgtctgcacattgtgctgttattgttggaactttgtgatcatttccatggacgctcaaaaaattcccggatccattactcctatccagactggaacaagacctagccttgaccaaaggcggcggaaagaccctaatccctcttcccaaatcctgatcatccttattaccacctccaggattcgaattaaacgaagcatgaaactccttccgggccaacctcggcgtcaaagttgacttcaaaatatacttgctgttgacttttttcaattccacatttttccttcgtctccaaattgtgttgacaaacgcgaattccactaaactcccaaaaataaacccggtgcaacctaaaaaccagatttctgaagctttgatgtacgatactttgggtaaagtttttccttgggcacttgctaaagtgataaatgataacatggtgcttgtacctaaggtgactctgggtgctgattggtctgctgccagccaaaaacttacccaggaacacgacacgatcattactgatggcaaaaagtaatccattaaatagtaacccatttcacgacttatttgaatcgtgaaacttaaggcactgtatgtcccaccaaatgctccgtgtctcaggtcatccaaatcagccttgacaactgtttcatttacccacatgtcagtaaggacatattcggtcaaatgtagttctggtgctaaagttactggtgcagttggttcccaagtcaataggagttcacttgtattgtacttccaactttccaacatcatctgacactgttgttcatcaaaaggaaatttccttaaattcatccaacagtacaaagttgccttcatcctgaccgaaaagacgactgtaccatcaggagctactgacaccaacatgtccttagattgggcatctgtgcccataacctgggaagatctctcgttggcaacgaatacatgtgggtacccagattttgtccctgagctgcgattcgcccatgatgaccgtcctgggtgggtgccacttttttgtaggccaatctggcgtcctgggtaacgaaattggaggaggacggtcacggaaaatgacaattcgtgcgcgtccgtattttgtataaaatacacgtaaattctggcggccaccgggagcggccctgcaccattgtgaggccccaaagggcgctccagcttatcgtacctgcaatcgtttgtcagcctggacaaaagttctgtctgggtgaagcgatctgcatcgtcgaaggctggacaaaggtctcctggtgtagcctggaagatatgcgatactggtggtactggtgaagccactggtaaagaaatatgctccttaccatgtgatgatggtttttttaattcttgttcatcaccaggttcattcaggctctttacaccgaggtggttgtcttcagtggttgtttttaccaattttgtggtagattcttctgaaatactggtttgatgtccaggatttttttcaacggtcgtggatgcgtttaaaattgt

SEQ ID NO: 25 - DNA, 1429 bp, Ctenocephalides felis
  CDS (18)..(1211)
  misc_feature (1178)..(1178): n = unknown
gtttttgtgtgagcgtgatgtctccggctcttttagcggttattgctgtgattttgtgcattttatttagaattttaaatgtaaatacacaaccgggaacgcctaaaatatggtgcaaagatgagacgtttcttgaggccatttacaaaattgctccgcttttacgagagccttatgtgcctcctagactctggggattcagcgggcacgtgcagacgatcgtgcacagcatagtgggccgcgtcaagtgcccactgccactcggagagagggtgtacctgtcactggctgatgggtcgacgctcacttacgatctatacaaagctcttaatccggataaacatgaagatgaggtaactctggcagtgtgccctggcataagtaactcctcggagtcggtctacattcgcacatttgtccattacgcacaatattacggatacagatgtgccgtacttaatcatattggtgccttatctggagtgcctgtcactaactctagaaatttcagttatggtcataccgatgattataatgaaatgattcgacatctgcaatcacagtttcctccttctaaaataatttgtgtgggctacagtttaagaggcaatatcatcaccaaatatcttggtgaaaagacaaaaattaaaaatggtaatataattggaggaatttcaatatgccaaggatacaacgccattgagggtacgaaatggctactgaattggcaaaatttccgtcgtttctacttgtatgttttaacagaaagtgtaaagacaataattttgaaacacagacatattctcctgtccgatgaaatgaaattaaaatgccaattgaatgagagagatatagcatcggcagccactttgccggaattggatgacgcctatacgagaaaagttcacaagtttccatctgtaaacgctttgtacaaatggagttcctgcataaactacatccaggacattgaaactccaatggtgttcataaatgctaaagatgatcctctactccatgatacgcttctagaccctataagaaaaattgctggttcttctagaagaatgatctacgtagaactttctcatggaggtcatccaagattctttgaaaggggtctcatataccccaatcccgttacctggatagatagggcagtgataagcttggttggnggtctcctgcttgcacataatgaaaagagctattaaaccaatttagatttataattattatttataaaaatttatgaaatatttttttgttataaattgtggatttatttttttatttgtgctgtcttttgcatcttgtgctcagttattcgatgttattgaagttattttctaaatttatatatacgcggatgtgaagatcaatatatgtcataaagttaggggatttaggggaaaaaaaaaaaaaaaaa

SEQ ID NO: 26 - protein, 398 aa, Ctenocephalides felis
MSPALLAVIAVILCILFRILNVNTQPGTPKIWCKDETFLEAIYKIAPLLREPYVPPRLWGFSGHVQTIVHSIVGRVKCPLPLGERVYLSLADGSTLTYDLYKALNPDKHEDEVTLAVCPGISNSSESVYIRTFVHYAQYYGYRCAVLNHIGALSGVPVTNSRNFSYGHTDDYNEMIRHLQSQFPPSKIICVGYSLRGNIITKYLGEKTKIKNGNIIGGISICQGYNAIEGTKWLLNWQNFRRFYLYVLTESVKTIILKHRHILLSDEMKLKCQLNERDIASAATLPELDDAYTRKVHKFPSVNALYKWSSCINYIQDIETPMVFINAKDDPLLHDTLLDPIRKIAGSSRRMIYVELSHGGHPRFFERGLIYPNPVTWIDRAVISLVGGLLLAHNEKSY

SEQ ID NO: 27 - DNA, 1429 bp, Ctenocephalides felis
  misc_feature (252)..(252): n = unknown
tttttttttttttttttcccctaaatcccctaactttatgacatatattgatcttcacatccgcgtatatataaatttagaaaataacttcaataacatcgaataactgagcacaagatgcaaaagacagcacaaataaaaaaataaatccacaatttataacaaaaaaatatttcataaatttttataaataataattataaatctaaattggtttaatagctcttttcattatgtgcaagcaggagaccnccaaccaagcttatcactgccctatctatccaggtaacgggattggggtatatgagacccctttcaaagaatcttggatgacctccatgagaaagttctacgtagatcattcttctagaagaaccagcaatttttcttatagggtctagaagcgtatcatggagtagaggatcatctttagcatttatgaacaccattggagtttcaatgtcctggatgtagtttatgcaggaactccatttgtacaaagcgtttacagatggaaacttgtgaacttttctcgtataggcgtcatccaattccggcaaagtggctgccgatgctatatctctctcattcaattggcattttaatttcatttcatcggacaggagaatatgtctgtgtttcaaaattattgtctttacactttctgttaaaacatacaagtagaaacgacggaaattttgccaattcagtagccatttcgtaccctcaatggcgttgtatccttggcatattgaaattcctccaattatattaccatttttaatttttgtcttttcaccaagatatttggtgatgatattgcctcttaaactgtagcccacacaaattattttagaaggaggaaactgtgattgcagatgtcgaatcatttcattataatcatcggtatgaccataactgaaatttctagagttagtgacaggcactccagataaggcaccaatatgattaagtacggcacatctgtatccgtaatattgtgcgtaatggacaaatgtgcgaatgtagaccgactccgaggagttacttatgccagggcacactgccagagttacctcatcttcatgtttatccggattaagagctttgtatagatcgtaagtgagcgtcgacccatcagccagtgacaggtacaccctctctccgagtggcagtgggcacttgacgcggcccactatgctgtgcacgatcgtctgcacgtgcccgctgaatccccagagtctaggaggcacataaggctctcgtaaaagcggagcaattttgtaaatggcctcaagaaacgtctcatctttgcaccatattttaggcgttcccggttgtgtatttacatttaaaattctaaataaaatgcacaaaatcacagcaataaccgctaaaagagccggagacatcacgctcacacaaaaac

SEQ ID NO: 28 - DNA, 1194 bp, Ctenocephalides felis
  CDS (1)..(1194)
  misc_feature (1161)..(1161): n = unknown
atgtctccggctcttttagcggttattgctgtgattttgtgcattttatttagaattttaaatgtaaatacacaaccgggaacgcctaaaatatggtgcaaagatgagacgtttcttgaggccatttacaaaattgctccgcttttacgagagccttatgtgcctcctagactctggggattcagcgggcacgtgcagacgatcgtgcacagcatagtgggccgcgtcaagtgcccactgccactcggagagagggtgtacctgtcactggctgatgggtcgacgctcacttacgatctatacaaagctcttaatccggataaacatgaagatgaggtaactctggcagtgtgccctggcataagtaactcctcggagtcggtctacattcgcacatttgtccattacgcacaatattacggatacagatgtgccgtacttaatcatattggtgccttatctggagtgcctgtcactaactctagaaatttcagttatggtcataccgatgattataatgaaatgattcgacatctgcaatcacagtttcctccttctaaaataatttgtgtgggctacagtttaagaggcaatatcatcaccaaatatcttggtgaaaagacaaaaattaaaaatggtaatataattggaggaatttcaatatgccaaggatacaacgccattgagggtacgaaatggctactgaattggcaaaatttccgtcgtttctacttgtatgttttaacagaaagtgtaaagacaataattttgaaacacagacatattctcctgtccgatgaaatgaaattaaaatgccaattgaatgagagagatatagcatcggcagccactttgccggaattggatgacgcctatacgagaaaagttcacaagtttccatctgtaaacgctttgtacaaatggagttcctgcataaactacatccaggacattgaaactccaatggtgttcataaatgctaaagatgatcctctactccatgatacgcttctagaccctataagaaaaattgctggttcttctagaagaatgatctacgtagaactttctcatggaggtcatccaagattctttgaaaggggtctcatataccccaatcccgttacctggatagatagggcagtgataagcttggttggnggtctcctgcttgcacataatgaaaagagctat

SEQ ID NO: 29 - protein, 398 aa, Ctenocephalides felis; identical to SEQ ID NO: 26

SEQ ID NO: 30 - DNA, 1194 bp, Ctenocephalides felis
  misc_feature (34)..(34): n = unknown
atagctcttttcattatgtgcaagcaggagaccnccaaccaagcttatcactgccctatctatccaggtaacgggattggggtatatgagacccctttcaaagaatcttggatgacctccatgagaaagttctacgtagatcattcttctagaagaaccagcaatttttcttatagggtctagaagcgtatcatggagtagaggatcatctttagcatttatgaacaccattggagtttcaatgtcctggatgtagtttatgcaggaactccatttgtacaaagcgtttacagatggaaacttgtgaacttttctcgtataggcgtcatccaattccggcaaagtggctgccgatgctatatctctctcattcaattggcattttaatttcatttcatcggacaggagaatatgtctgtgtttcaaaattattgtctttacactttctgttaaaacatacaagtagaaacgacggaaattttgccaattcagtagccatttcgtaccctcaatggcgttgtatccttggcatattgaaattcctccaattatattaccatttttaatttttgtcttttcaccaagatatttggtgatgatattgcctcttaaactgtagcccacacaaattattttagaaggaggaaactgtgattgcagatgtcgaatcatttcattataatcatcggtatgaccataactgaaatttctagagttagtgacaggcactccagataaggcaccaatatgattaagtacggcacatctgtatccgtaatattgtgcgtaatggacaaatgtgcgaatgtagaccgactccgaggagttacttatgccagggcacactgccagagttacctcatcttcatgtttatccggattaagagctttgtatagatcgtaagtgagcgtcgacccatcagccagtgacaggtacaccctctctccgagtggcagtgggcacttgacgcggcccactatgctgtgcacgatcgtctgcacgtgcccgctgaatccccagagtctaggaggcacataaggctctcgtaaaagcggagcaattttgtaaatggcctcaagaaacgtctcatctttgcaccatattttaggcgttcccggttgtgtatttacatttaaaattctaaataaaatgcacaaaatcacagcaataaccgctaaaagagccggagacat

SEQ ID NO: 31 - DNA, 765 bp, Ctenocephalides felis
  CDS (2)..(763)
tcacaatttgtatttgcatagtgcccttgtaaagtcgagagatgtcgacaggagaaacccggagaaagtgagagacgctaattattatttctttatcgaagcagcgattgcactatttatatctttcataataaatgtgttcgtagttgctgtgtttgcacatggtttatttaaaactactaaccaagaaatcttagacacttgcaaaagttcagccccatatatccgagaggaagccctaatagtctttaacaacaatactgaaattgtagaagccgatttgtacaaaggaggcatttatttaggctgtgccttcggggctgcagccgtgtacatttgggctgtcggaatattggcagccggtcaaagttctacaatgactgggacttatgctggtcaattcgccatggagggtttcctcaacctacaatggtctcgctggaagaggatcctattcacccgaatgattgccatcataccaacatttctgatggcatttttcaatagcatcgaagacctatcgggtatgaacgaccttctgaatgcagtgatgtccttacaactaccttttgcgaccctaccgactatagcgtttaccagcaatgctgctatcatgggagaattcgttaatggagcggttaattcagtcgttgcaatccttctatcgattttagtaattgcaatcaatatttattttgtggtcgaccaggttaataatggagacctgacggaaggctatttagctcttatagtgatatttggaat

SEQ ID NO: 32 - protein, 254 aa, Ctenocephalides felis
HNLYLHSALVKSRDVDRRNPEKVRDANYYFFIEAAIALFISFIINVFVVAVFAHGLFKTTNQEILDTCKSSAPYIREEALIVFNNNTEIVEADLYKGGIYLGCAFGAAAVYIWAVGILAAGQSSTMTGTYAGQFAMEGFLNLQWSRWKRILFTRMIAIIPTFLMAFFNSIEDLSGMNDLLNAVMSLQLPFATLPTIAFTSNAAIMGEFVNGAVNSVVAILLSILVIAINIYFVVDQVNNGDLTEGYLALIVIFG

SEQ ID NO: 33 - DNA, 765 bp, Ctenocephalides felis
attccaaatatcactataagagctaaatagccttccgtcaggtctccattattaacctggtcgaccacaaaataaatattgattgcaattactaaaatcgatagaaggattgcaacgactgaattaaccgctccattaacgaattctcccatgatagcagcattgctggtaaacgctatagtcggtagggtcgcaaaaggtagttgtaaggacatcactgcattcagaaggtcgttcatacccgataggtcttcgatgctattgaaaaatgccatcagaaatgttggtatgatggcaatcattcgggtgaataggatcctcttccagcgagaccattgtaggttgaggaaaccctccatggcgaattgaccagcataagtcccagtcattgtagaactttgaccggctgccaatattccgacagcccaaatgtacacggctgcagccccgaaggcacagcctaaataaatgcctcctttgtacaaatcggcttctacaatttcagtattgttgttaaagactattagggcttcctctcggatatatggggctgaacttttgcaagtgtctaagatttcttggttagtagttttaaataaaccatgtgcaaacacagcaactacgaacacatttattatgaaagatataaatagtgcaatcgctgcttcgataaagaaataataattagcgtctctcactttctccgggtttctcctgtcgacatctctcgactttacaagggcactatgcaaatacaaattgtga

SEQ ID NO: 34 - DNA, 762 bp, Ctenocephalides felis
  CDS (1)..(762)
cacaatttgtatttgcatagtgcccttgtaaagtcgagagatgtcgacaggagaaacccggagaaagtgagagacgctaattattatttctttatcgaagcagcgattgcactatttatatctttcataataaatgtgttcgtagttgctgtgtttgcacatggtttatttaaaactactaaccaagaaatcttagacacttgcaaaagttcagccccatatatccgagaggaagccctaatagtctttaacaacaatactgaaattgtagaagccgatttgtacaaaggaggcatttatttaggctgtgccttcggggctgcagccgtgtacatttgggctgtcggaatattggcagccggtcaaagttctacaatgactgggacttatgctggtcaattcgccatggagggtttcctcaacctacaatggtctcgctggaagaggatcctattcacccgaatgattgccatcataccaacatttctgatggcatttttcaatagcatcgaagacctatcgggtatgaacgaccttctgaatgcagtgatgtccttacaactaccttttgcgaccctaccgactatagcgtttaccagcaatgctgctatcatgggagaattcgttaatggagcggttaattcagtcgttgcaatccttctatcgattttagtaattgcaatcaatatttattttgtggtcgaccaggttaataatggagacctgacggaaggctatttagctcttatagtgatatttgga

SEQ ID NO: 35 - protein, 254 aa, Ctenocephalides felis; identical to SEQ ID NO: 32

SEQ ID NO: 36 - DNA, 762 bp, Ctenocephalides felis
tccaaatatcactataagagctaaatagccttccgtcaggtctccattattaacctggtcgaccacaaaataaatattgattgcaattactaaaatcgatagaaggattgcaacgactgaattaaccgctccattaacgaattctcccatgatagcagcattgctggtaaacgctatagtcggtagggtcgcaaaaggtagttgtaaggacatcactgcattcagaaggtcgttcatacccgataggtcttcgatgctattgaaaaatgccatcagaaatgttggtatgatggcaatcattcgggtgaataggatcctcttccagcgagaccattgtaggttgaggaaaccctccatggcgaattgaccagcataagtcccagtcattgtagaactttgaccggctgccaatattccgacagcccaaatgtacacggctgcagccccgaaggcacagcctaaataaatgcctcctttgtacaaatcggcttctacaatttcagtattgttgttaaagactattagggcttcctctcggatatatggggctgaacttttgcaagtgtctaagatttcttggttagtagttttaaataaaccatgtgcaaacacagcaactacgaacacatttattatgaaagatataaatagtgcaatcgctgcttcgataaagaaataataattagcgtctctcactttctccgggtttctcctgtcgacatctctcgactttacaagggcactatgcaaatacaaattgtg

SEQ ID NO: 37 - DNA, 604 bp, Ctenocephalides felis
  CDS (26)..(430)
tcaatactcttacttacagatcaaaatgagatccttcctcctcgctacattcgcagccttgttggtttgctctgtttttgctagacctcaagaagataaatatactagcaaatttgataacatcaatttagatgaaattttgcaaagcaatagattgctcaacaactatgtaaactgccttctcgacaaaggcagctgcacagcagaaggaaaagaattgaaaaaagtcttacctgatgccttatccaacgagtgcgctaaatgtagcgagaaacaaagagaaggagctgagaaagtaatcagatttttcgtcaacaacaaaccagaagagtggaagaaactttctgcagtttacgatccaaccggcgagtacacaaagaaatatagcacccaaattgaacaagtgaagagaggcgaacccgttacagtttaaatttccaaaaagagatttctcaaaatattggcaagtcatttaggaatcgtagtgttattttcacctgtagatatttctgtttttaataataaaaaaaatgtagttgtaggacaaatagagcatatttaaataaaaaaaaaaaaaaaaaaaaaaaaaaaaaaaaaaaaaaaa

SEQ ID NO: 38 - protein, 135 aa, Ctenocephalides felis
MRSFLLATFAALLVCSVFARPQEDKYTSKFDNINLDEILQSNRLLNNYVNCLLDKGSCTAEGKELKKVLPDALSNECAKCSEKQREGAEKVIRFFVNNKPEEWKKLSAVYDPTGEYTKKYSTQIEQVKRGEPVTV

SEQ ID NO: 39 - DNA, 604 bp, Ctenocephalides felis
ttttttttttttttttttttttttttttttttttttttttatttaaatatgctctatttgtcctacaactacattttttttattattaaaaacagaaatatctacaggtgaaaataacactacgattcctaaatgacttgccaatattttgagaaatctctttttggaaatttaaactgtaacgggttcgcctctcttcacttgttcaatttgggtgctatatttctttgtgtactcgccggttggatcgtaaactgcagaaagtttcttccactcttctggtttgttgttgacgaaaaatctgattactttctcagctccttctctttgtttctcgctacatttagcgcactcgttggataaggcatcaggtaagacttttttcaattcttttccttctgctgtgcagctgcctttgtcgagaaggcagtttacatagttgttgagcaatctattgctttgcaaaatttcatctaaattgatgttatcaaatttgctagtatatttatcttcttgaggtctagcaaaaacagagcaaaccaacaaggctgcgaatgtagcgaggaggaaggatctcattttgatctgtaagtaagagtattga

SEQ ID NO: 40 - DNA, 405 bp, Ctenocephalides felis
  CDS (1)..(405)
atgagatccttcctcctcgctacattcgcagccttgttggtttgctctgtttttgctagacctcaagaagataaatatactagcaaatttgataacatcaatttagatgaaattttgcaaagcaatagattgctcaacaactatgtaaactgccttctcgacaaaggcagctgcacagcagaaggaaaagaattgaaaaaagtcttacctgatgccttatccaacgagtgcgctaaatgtagcgagaaacaaagagaaggagctgagaaagtaatcagatttttcgtcaacaacaaaccagaagagtggaagaaactttctgcagtttacgatccaaccggcgagtacacaaagaaatatagcacccaaattgaacaagtgaagagaggcgaacccgttacagtt

SEQ ID NO: 41 - protein, 135 aa, Ctenocephalides felis; identical to SEQ ID NO: 38

SEQ ID NO: 42 - DNA, 405 bp, Ctenocephalides felis
aactgtaacgggttcgcctctcttcacttgttcaatttgggtgctatatttctttgtgtactcgccggttggatcgtaaactgcagaaagtttcttccactcttctggtttgttgttgacgaaaaatctgattactttctcagctccttctctttgtttctcgctacatttagcgcactcgttggataaggcatcaggtaagacttttttcaattcttttccttctgctgtgcagctgcctttgtcgagaaggcagtttacatagttgttgagcaatctattgctttgcaaaatttcatctaaattgatgttatcaaatttgctagtatatttatcttcttgaggtctagcaaaaacagagcaaaccaacaaggctgcgaatgtagcgaggaggaaggatctcat

SEQ ID NO: 43 - DNA, 1227 bp, Ctenocephalides felis
  CDS (312)..(1049)
gcgttttctaaaacaaacttctttataatgtaaataaatagaaatgaaatgtgaataaatttgagtatgaaaacaaattaatcaacaacacaatttaatttccttatttcatttataatgttggcattctaataaattaagttattatgagaaaacttcattacagtgatgtgtcaagctcctgtcaaaataaattgaaaatctgtttgtgataaaaattgttttttctataaaaatagcataatttaggaaactatatcgaaaaaataataaatttttaagtggccctttaatatcttctagaattaaatatggcaaccgtaccccttatgtttgctgaagatgacctagaaggtggtggaaaagaaggttcaatagagaatgactttgcatataacaataacgttattaatgcatctgttcgtgtgagacttggattcattcgaaaagtctatggactacttacagttcagttgttattgagcttgctggtgggcatagcctgccaaattgagcctgtacaaggaattgttaaagcaaatgactggctcgtattagtctgcatgatcagtagcattggtgtgctgattgctcttcacatcaagagaaaggaaacaccaactaattttattcttttaacaattttcacaattacaaactccatcagtgtgggtgtgctagtaacacattttaaagctagtttagtacttcaagctattgcaattactttgtgtgttgttattggtataacactctttacattacaaaacaaactggatttatcaatgctcccagcagcattgtttactggactttgctgtttattggtaggtggtatcattcagatattcactcattcaaccatttttgaattagtgttatgcagttttggtgcactaatattcagcttgtttttgctttatgacacgcatgttatgatgacgacattatcaccagaagagtatattttggccacaattaacttgtacttagatattgtcaatctattcatatatattttaagaattctgcaagcagcagacaggggttaaatcatctgtgataaaatataaatggttcaaaattctatattgtattatttatatatttaaaaatgccttgcttatttatattgtatgtttccatttattgtatatagtttattttgttattttatggccaagattaataaattcgaaattaatatgcaaaaaaaaaaaaaaaaaa

SEQ ID NO: 44 - protein, 246 aa, Ctenocephalides felis
MATVPLMFAEDDLEGGGKEGSIENDFAYNNNVINASVRVRLGFIRKVYGLLTVQLLLSLLVGIACQIEPVQGIVKANDWLVLVCMISSIGVLIALHIKRKETPTNFILLTIFTITNSISVGVLVTHFKASLVLQAIAITLCVVIGITLFTLQNKLDLSMLPAALFTGLCCLLVGGIIQIFTHSTIFELVLCSFGALIFSLFLLYDTHVMMTTLSPEEYILATINLYLDIVNLFIYILRILQAADRG

SEQ ID NO: 45 - DNA, 1227 bp, Ctenocephalides felis
ttttttttttttttttttgcatattaatttcgaatttattaatcttggccataaaataacaaaataaactatatacaataaatggaaacatacaatataaataagcaaggcatttttaaatatataaataatacaatatagaattttgaaccatttatattttatcacagatgatttaacccctgtctgctgcttgcagaattcttaaaatatatatgaatagattgacaatatctaagtacaagttaattgtggccaaaatatactcttctggtgataatgtcgtcatcataacatgcgtgtcataaagcaaaaacaagctgaatattagtgcaccaaaactgcataacactaattcaaaaatggttgaatgagtgaatatctgaatgataccacctaccaataaacagcaaagtccagtaaacaatgctgctgggagcattgataaatccagtttgttttgtaatgtaaagagtgttataccaataacaacacacaaagtaattgcaatagcttgaagtactaaactagctttaaaatgtgttactagcacacccacactgatggagtttgtaattgtgaaaattgttaaaagaataaaattagttggtgtttcctttctcttgatgtgaagagcaatcagcacaccaatgctactgatcatgcagactaatacgagccagtcatttgctttaacaattccttgtacaggctcaatttggcaggctatgcccaccagcaagctcaataacaactgaactgtaagtagtccatagacttttcgaatgaatccaagtctcacacgaacagatgcattaataacgttattgttatatgcaaagtcattctctattgaaccttcttttccaccaccttctaggtcatcttcagcaaacataaggggtacggttgccatatttaattctagaagatattaaagggccacttaaaaatttattattttttcgatatagtttcctaaattatgctatttttatagaaaaaacaatttttatcacaaacagattttcaatttattttgacaggagcttgacacatcactgtaatgaagttttctcataataacttaatttattagaatgccaacattataaatgaaataaggaaattaaattgtgttgttgattaatttgttttcatactcaaatttattcacatttcatttctatttatttacattataaagaagtttgttttagaaaacgc

SEQ ID NO: 46 - DNA, 738 bp, Ctenocephalides felis
  CDS (1)..(738)
atggcaaccgtaccccttatgtttgctgaagatgacctagaaggtggtggaaaagaaggttcaatagagaatgactttgcatataacaataacgttattaatgcatctgttcgtgtgagacttggattcattcgaaaagtctatggactacttacagttcagttgttattgagcttgctggtgggcatagcctgccaaattgagcctgtacaaggaattgttaaagcaaatgactggctcgtattagtctgcatgatcagtagcattggtgtgctgattgctcttcacatcaagagaaaggaaacaccaactaattttattcttttaacaattttcacaattacaaactccatcagtgtgggtgtgctagtaacacattttaaagctagtttagtacttcaagctattgcaattactttgtgtgttgttattggtataacactctttacattacaaaacaaactggatttatcaatgctcccagcagcattgtttactggactttgctgtttattggtaggtggtatcattcagatattcactcattcaaccatttttgaattagtgttatgcagttttggtgcactaatattcagcttgtttttgctttatgacacgcatgttatgatgacgacattatcaccagaagagtatattttggccacaattaacttgtacttagatattgtcaatctattcatatatattttaagaattctgcaagcagcagacaggggt

SEQ ID NO: 47 - protein, 246 aa, Ctenocephalides felis; identical to SEQ ID NO: 44

SEQ ID NO: 48 - DNA, 738 bp, Ctenocephalides felis
acccctgtctgctgcttgcagaattcttaaaatatatatgaatagattgacaatatctaagtacaagttaattgtggccaaaatatactcttctggtgataatgtcgtcatcataacatgcgtgtcataaagcaaaaacaagctgaatattagtgcaccaaaactgcataacactaattcaaaaatggttgaatgagtgaatatctgaatgataccacctaccaataaacagcaaagtccagtaaacaatgctgctgggagcattgataaatccagtttgttttgtaatgtaaagagtgttataccaataacaacacacaaagtaattgcaatagcttgaagtactaaactagctttaaaatgtgttactagcacacccacactgatggagtttgtaattgtgaaaattgttaaaagaataaaattagttggtgtttcctttctcttgatgtgaagagcaatcagcacaccaatgctactgatcatgcagactaatacgagccagtcatttgctttaacaattccttgtacaggctcaatttggcaggctatgcccaccagcaagctcaataacaactgaactgtaagtagtccatagacttttcgaatgaatccaagtctcacacgaacagatgcattaataacgttattgttatatgcaaagtcattctctattgaaccttcttttccaccaccttctaggtcatcttcagcaaacataaggggtacggttgccat

SEQ ID NO: 49 - DNA, 31 bp, Artificial Sequence
  Description of Artificial Sequence:  Synthetic Primer
gcggatcctatgctgaattgcaagaaccttg

SEQ ID NO: 50 - DNA, 30 bp, Artificial Sequence
  Description of Artificial Sequence:  Synthetic Primer
caggtaccctcttttagaagcaccggtccc

SEQ ID NO: 51 - DNA, 29 bp, Artificial Sequence
  Description of Artificial Sequence:  Synthetic Primer
cgggatcctgctgacaggaattcgcccac

SEQ ID NO: 52 - DNA, 31 bp, Artificial Sequence
  Description of Artificial Sequence: Synthetic Primer
catggtacccctggtttaagccttacttagc

SEQ ID NO: 53 - DNA, 23 bp, Artificial Sequence
  Description of Artificial Sequence:  Synthetic Primer
ccattattaacctggtcgaccac

SEQ ID NO: 54 - DNA, 18 bp, Artificial Sequence
  Description of Artificial Sequence:  Synthetic Primer
ggaaacagtatgaccatg

SEQ ID NO: 55 - DNA, 21 bp, Artificial Sequence
  Description of Artificial Sequence:  Synthetic Primer
cgctatagtcggtagggtcgc

SEQ ID NO: 56 - DNA, 20 bp, Artificial Sequence
  Description of Artificial Sequence:  Synthetic Primer
aattaaccctcactaaaggg

SEQ ID NO: 57 - DNA, 20 bp, Artificial Sequence
  Description of Artificial Sequence:  Synthetic Primer
caaaactggtctccccgctc

SEQ ID NO: 58 - DNA, 20 bp, Artificial Sequence
  Description of Artificial Sequence:  Synthetic Primer
taatacgactcactataggg

SEQ ID NO: 59 - DNA, 20 bp, Artificial Sequence
  Description of Artificial Sequence:  Synthetic Primer
ggttcgcctctcttcacttg

SEQ ID NO: 60 - DNA, 21 bp, Artificial Sequence
  Description of Artificial Sequence:  Synthetic Primer
cggttggatcgtaaactgcag

SEQ ID NO: 61 - DNA, 40 bp, Artificial Sequence
  Description of Artificial Sequence:  Synthetic Primer
cgcggatccagaagataaatatactagcaaatttgataac

SEQ ID NO: 62 - DNA, 37 bp, Artificial Sequence
  Description of Artificial Sequence:  Synthetic Primer
gaggaattcctctttttggaaatttaaactgtaacgg

SEQ ID NO: 63 - DNA, 500 bp, Ctenocephalides felis
  misc_feature (7)..(7): n = unknown
  misc_feature (46)..(46): n = unknown
  misc_feature (120)..(120): n = unknown
  misc_feature (188)..(188): n = unknown
  misc_feature (358)..(358): n = unknown
  misc_feature (381)..(381): n = unknown
  misc_feature (398)..(400): n = unknown
  misc_feature (406)..(406): n = unknown
  misc_feature (408)..(409): n = unknown
  misc_feature (417)..(418): n = unknown
  misc_feature (421)..(421): n = unknown
  misc_feature (426)..(427): n = unknown
  misc_feature (430)..(430): n = unknown
  misc_feature (434)..(434): n = unknown
  misc_feature (436)..(436): n = unknown
  misc_feature (438)..(438): n = unknown
  misc_feature (442)..(442): n = unknown
  misc_feature (445)..(449): n = unknown
  misc_feature (453)..(453): n = unknown
  misc_feature (456)..(456): n = unknown
  misc_feature (458)..(458): n = unknown
  misc_feature (460)..(460): n = unknown
  misc_feature (462)..(466): n = unknown
  misc_feature (469)..(469): n = unknown
  478misc_feature (469)..(469): n = unknown
  misc_feature (478)..(478): n = unknown
  misc_feature (480)..(480): n = unknown
  misc_feature (484)..(484): n = unknown
  misc_feature (488)..(490): n = unknown
  misc_feature (495)..(497): n = unknown
accaggncgaataatatttctaattgtttcaatacaaactataaanggtattaaaattattggagttccttgaggcactagatgactaaatatatggttataattattaattcatcctantaatataaatcttaatcataaaggaagtcttaatcttaaagttaaagttaaatgactagttcttgtanaaatgtaattaaataatcctaaaaaattattaaataaaataaatgaaaataatctaataaatataaaagttcttcctataggattatattttataagtaatttaaattcattatgaagtgttataataatttttaatcaaattatgttgtatcgggacggaattattcanaatatatttggaataaataatantcctaatacctgccggnnntttgtntnntctctccnnctntccannctnatcncntncccntcnnnnntganatncntntnnnnnctntctcccctncntacnctgnnnctccnnnttc

SEQ ID NO: 64 - DNA, 164 bp, Ctenocephalides felis
gcagctaacaagaatgtattaactgcattccaaagaagaaattattctgatgaattatctttgacatttgctgctgccaataaggtattctatgactcagtagatgtaaagcaggtggatgttccatctttcagtggtgcttttggtatcttagctaaacacgt

SEQ ID NO: 65 - DNA, 337 bp, Ctenocephalides felis
cgcttccagttgacgtttcgtctcatgcaataattaattaaacttgtttgttagaggtgcaaaataaaattaaattaaaatgactgcctggagacaagctggtttaaactacattaacttttcaacaattgctgcccgaatggtccgccaagctttgaaatctgatctaaaaaatgaggctttgaaacgggacgtatctagcattaaattcacaccctggaaggacggaaaagcgatcactggaaaaccggaataaaatcaaatactcatctataaaagtgaaaccaagtaatcacaagatggaataatagacaattcactcaaattaataatgtgt

SEQ ID NO: 66 - DNA, 201 bp, Ctenocephalides felis
acaggccatttatgtgccagctgatgacttgacagatcctgcccctgccactacattcgctcacttggacgccaccactgtattgtcccgtgccattgctgaattaggtatctacccagctgtggatcctttggattctacatcccgtattatggaccccaacatcattggagctgaacattacaacattgcccgtggcgt

SEQ ID NO: 67 - DNA, 179 bp, Ctenocephalides felis
accttgagacttttggcagctaacaagaatgtattaactgcattccaaagaagaaattattctgatgaattatctttgacatttgctgctgccaataaggtattctatgactcagtagatgtaaagcaggtggatgttccatctttcagtggtgcttttggtatcttagctaaacacgt

SEQ ID NO: 68 - DNA, 500 bp, Ctenocephalides felis
acaccatcattgtatcagccactgcttctgatgctgcccctcttcaatatcttgctccatactctggatgtgctatgggtgaattcttccgtgacaatggaaaacatgctttgatcatctatgatgatttatccaaacaagctgttgcttatcgtcaaatgtctctattgttacgtcgtccaccaggtcgtgaggcttatccaggtgatgtcttctaccttcactcacgtctacttgaacgtgccgctaaaatgtctgaagctcatggaggtggctctttgactgctttgccagttattgaaacacaagctggtgacgtatcagcttatattccaactaatgtcatttccattactgatggcaaatcttcttggaaactgaattgttctacaagggtattcgaccagccatcaatgtaggtttatctgtatctcgtgtaggtctgctgcacaaaccaaagccatgaaacaggttgccggttcatgaaactggaattagct

SEQ ID NO: 69 - DNA, 549 bp, Ctenocephalides felis
  misc_feature (546)..(546): n = unknown
tacataatggcatctttgaagttaaatatcgtaaccaggagcttaagctcatctgcagtcgcgtctcaaatggttaaaccacccgtacaagtatatggaattgagggtagatacgcaactgccttgtactcaggagccagtaagaataaagtactcgacgccgtcgagaaagatttggtcaaaatacagaataacttaaagaccgatgtaaaattccgcgatttcattgccaatccaacattcaagcgctcaattaaatcaaatgcattgaaggaagccagcagcaagctgcaaatggctccagctacttctaacttgttggagttacttgctgagaatggacgtttaaataaactggaaggtgttatcaacgcttataaagttatgatgtctgctcatcgtggagaggttccatgtgaagttacaacagctaaacctttagatgagaatcaacgaaaacaacttgaaagcctttaagaggattcttaaaacccaaagaaaacttattactacccttaagtaatcctcatcttggtggaatgtcgntca

SEQ ID NO: 70 - DNA, 238 bp, Ctenocephalides felis
actgctgatccctgtccctcgccccagcataataccattaggttgaaacgtccatttcctgcgtccaccagattgcgagtgtaacggtaacgatcaaatttggcataccgcctccactcggctggatccgacttgtagctcagcatcagatgattgaccaactcgatgtctacatcatcttcagcaaatgcttcgtgcaactgttcaactagatcttttagagaagtaacaccttggt

SEQ ID NO: 71 - DNA, 500 bp, Ctenocephalides felis
actaatgacaaggctggtggtccccattatgtcttgcgctggactactcctcaatctatcaaggagacatttgttccaatcacatgtgtcgactatccatacatgagagaataagctgccaaatcccccccaaagcacccacaccataacaataattcaatggacactaaaccaaagatgcgtgttacaaatactctgttcaagatctcgatcataaaatttgcacacagtccggttcacttttgatttctgttattcagtaactattttatctttaccgcgcacttggaaaataacaggtgaatcaaagaaattgattttagtaattatttttcttgttatataaataaaagaatattatagtaacattttgccattaaaaatattaattttacctaggaagcaatatcaagtattcattcaagtcaaatttgaagacatttattaaaaatcgatgttgccattttattaaatagattatgaaaattatgggggtatta

SEQ ID NO: 72 - DNA, 500 bp, Ctenocephalides felis
acatataatattgataatatgcatagggcggattttcagtgtctgtccattcttctggtgtcggaacatccttatcgaataatggattttcgggtttactttcatcatccaccgagtcaaaacctatcacgaactgaagaaacttgtgtagttcaggatgcgattgtggatcattcgtaacttcaaataatggcaaatagatatttgtaagaatttcttggaaattgttcatcagcttatttaatttgaaaatatcgtataatcgtggtatttgaataagccagcgcacattatcactataaacattagattctattgcccattttgcaagtttatcccactcttcaggacttttaccataaattgaaagtctcaattcgcaattttgatatttgctttcttctaaatccgaactaacttcattgataattcttgcaaaatattttccgttcaagtagttatcggttttaagaaacttctctcaatctgctttcaccaat

SEQ ID NO: 73 - DNA, 500 bp, Ctenocephalides felis
  misc_feature (64)..(65): n = unknown
actaattaattttaaaaaattaaggatagaaaccaacctggcttaaaccggtttgaactcagannatgtaagaattaatggtcgaacagaccaaattttaaaacttctgcattttaaaattatcttaatccaacatcgaggtcgcaatctattttgtcgatatgttctcttaaaaataattacgctgttatcccttaagtaacttaatcttttaatcataatttatggatcaattattcaattatttatgttttaataaaaaaaaagttttataaattttcctatcaccccaataaaatatattaatataaataaatttaataatattcttaaaattaatctatatttatatataaaactttaaagggtcttctcgtcctttaataatatttacgctttttaacataaaaattaaattctataacaattttattaagacaggtaatattcattcaatcattcattccagcttcaattaaaaaactatggattatgctacc

SEQ ID NO: 74 - DNA, 500 bp, Ctenocephalides felis
  misc_feature (32)..(34): n = unknown
ccttatgatattcataaatctaaaccacagtnnntttttcttgcactttgtgcaaaactatattccagtgttgtctgcctttgacacagctcaacattttgttgcattttgcaatctttcactaatatctgcccagttggcaacatcgaaaattgcttttacatagtcagccctgacatttttatattgaaggtagtatgcatgttcccagacgtcaattccaaatagtggaaccagaccagtggttgcttccaatggatcttgatttgcgcatgtagctatttgtaactttttagcagttttattataagccagccatccccatcctgagccttgaacacctacagctgctgtagacaaagcagttttcatcttatccatagatccaaaatcacattcaatcattttctgtagctggtcacttggtttaccccccttcggggaaaggtttttccaaaagatagaatgattgatgtgcctcctccattgaatttcaatgc

SEQ ID NO: 75 - DNA, 348 bp, Ctenocephalides felis
cagtgacgaaaagcaagtgccattatcgttctctccgtcgatttacgaaactacacttcaattccaaaaaggataactgggactcgcattccgactcactacccaacgactacgatttaattagctaaaggccaaattaaagcttcaagatgccgttcaagccagtagaaaacccaaaatgcccaaaatgcggcaaatcagtatatgccgccgaagagcgtgttgccggtggacttaagtggcacaaaatgtgtttcaaatgcggtatgtgcagcaaattgttggactccaccaactgcactgagcacgaaggtgagttgttctgcaagaactgccacgcccgcaagt

SEQ ID NO: 76 - DNA, 451 bp, Ctenocephalides felis
actatatataatatatatcgattttctatattagtcaaatatatgtgttaagcatttttttagagcattcctatttaaaaataaaatgttacgtcaaatttgaaaattccaagtaaaaaaatagtttttttctatatttgaattttgatcgttgtattactacgaatgttgccttgagatgtgcgttctattttgtagaataaatatcattcgtaatgaattaattcgcgtttaagccctgtttttggcgcagtccgggcatataatgtcggcgccgtctgtgatgaagccacggccgactagagaagctttgcatgacgcgcaggtgaagcagtcattgtgccaatggcgatcttcaaacgagatgaagcgagtgccaccaattcctgtaatgggtttggtgcaagccgtgcatctcttagcaaacaattcaccgaacattcagcacagt

SEQ ID NO: 77 - DNA, 500 bp, Ctenocephalides felis
  misc_feature (72)..(72): n = unknown
accacatatgacttcaatgggacttggtaatggaggctcttcactcacttcggggcaaaacatatcttctgngggatcactgccaaattctattgaaacttgtaaatccaatctacctcacaataattctgcacaaacaccagaaaatccttacgtttatgatacagtaacttctaattatagccaaccaccagtaacttcatcaccatatgcaccagtagaacctaagagagcgcagggacatccattaaaaagtttcagtgttccggcaccacccacatcatcaactccaaatactcctaacaccaagcataatgcttcccaaggtattaatcgaccacaaaatgcatcaccatataaaaaacctttaatgattaatagactgcaagcaggaccatcagtttgtcattcatcagatgaagttcaacgactggctccgagccctcaactgaggaattgcatcaagaaatggctatttggaaggcttaatgaaagactaa

SEQ ID NO: 78 - DNA, 550 bp, Ctenocephalides felis
ggagaacggacaccaacagcaaggtggcgagtacaccaaggccatgaacaaggactggcactctggtcacttctgctgctggcaatgcgacgagtcactgaccggccaacgctacgtactccgcgacgaacatccttactgcatcaagtgctacgagagcgtcttttccaacacctgcgaggaatgcagcaagatcattggcattgattccaaggacttatcttacaaagaaaagcattggcatgaggcatgtttcttgtgcagtaaatgccgcgtatctctcgtcgataaacagttcggaagtaaattggacaaaatctactgtggaaactgctatgatgcccaattcgcttccaggtgtgatggttgcggcgaaatcttccgtgcgggtactaaaaaaatggagtacaaaactcgtcaatggcatgaaaagtgtttctgctgctgtgtgtgcaagactgtatcggaaccaaaagctttattctcgtgagcaggaaattattgccagctgtatgaggaaagttcgcaccagatcattaaatgcataaga

SEQ ID NO: 79 - DNA, 550 bp, Ctenocephalides felis
  misc_feature (343)..(343): n = unknown
  misc_feature (377)..(377): n = unknown
  misc_feature (401)..(401): n = unknown
  misc_feature (408)..(408): n = unknown
  misc_feature (417)..(417): n = unknown
  misc_feature (430)..(430): n = unknown
  misc_feature (434)..(434): n = unknown
  misc_feature (447)..(447): n = unknown
  misc_feature (508)..(508): n = unknown
  misc_feature (528)..(528): n = unknown
  misc_feature (545)..(545): n = unknown
ttatttttgtgtgatttaataaattctagtgaactgttcattgctaaatatcacatagaaatgtctataaataacgataaaactaatttggatttgttggaagaagacgacgagtttgaggagtttccttgcgacgattgggcatcacacgacgaagatgcagatgatgttacagtttgggaagataattgggatgatgataatgttaaagatgacttcagccagcaattaaggtctcaaatgagcaatcctaaagaggcatctaaaaaaagttaagactatgtatatattagaatataatgtaatttcaaaaaacataattaataaactgattttttaaatnttaaaaaaaaaaaaaaaaaaaaaaaaaaaccctngggggggggcccggccccaattcnccctatngggagtcgnttcaattcactgnccgngttttcacgtcgngactgggaaaccctgcgttacccacttaatcccttgagcacatccccttttcccagtgggnaataggaaaaggccccccgntccccttccacattgcncacct

SEQ ID NO: 80 - DNA, 549 bp, Ctenocephalides felis
  misc_feature (523)..(524): n = unknown
  misc_feature (546)..(546): n = unknown
gctatcagtccacctaaaagcaaaaccagcccattaagtgtgtcttcaaaaggaagggccatagatttttcaaatcagtttgacgttggcgaaaagcagaaaacaaaaatagacgacatgaatgacatgatgtcgacaaaaaacatcatcgccgataaggataaaacgaaaatcgacagcaaaggtcttgatgatgtaagcatggatgatgacgatgacgacgatgtgatatcagcaggcgacgtttcgaaaagtaaatcagaacaatcactggctcgaaaaccaatactgaccacaaatgattcgccaaatatgcaagtgcattgtatcttcaatggaacaacatataagccaggacattcgttagataaacactgtgaaggcatgtgcaaatgttccgaagaaggtctttggagatgtgagcccaggtgtgaagctcttatgtcacaagactcctgatggcaccctaaatgatgtcaccaccaaaaatgaaaggggtgccgcgaaatggccacccaacaannatgctgcctgtctggttggcancgt

SEQ ID NO: 81 - DNA, 500 bp, Ctenocephalides felis
  misc_feature (414)..(414): n = unknown
actgttgctcttcgcgaaatccgtcgttatcagaaatccactgaattgttgatccgaaaattgccattccaacgtttggtgagagaaattgcccaggatttcaagactgatctacgtttccagtcagctgctattggtgctctacaggaagccagtgaggcttatctcgttggcttatttgaagatacaaatttgtgcgccattcatgccaagagggtaacaattatgcctaaagatatccagttagcgcggcgaattcgtggtgaacgtgcttaaaattcgggttatcaagaagccagatatcccacatgcacatctcgatatttacctattataaatatacacatatatgtggaaatcgtgacatttatgtttaagcattcacttttataacaaatcatctttacatcttangacgtagtcaaaaatttggtaacaatattttgcatttgaatatgaaattttagctttaatcatatttatattatcatttttgtgta

SEQ ID NO: 82 - DNA, 238 bp, Ctenocephalides felis
aaacaattccgagattaacggggctcgacccggcgaaatcggtgcttgcgtatcgagcgcaataaaaacattatataacacaaacaatgcagattattcggttaacgaaattataagtgaaaaaaagtcattaggaaacacaaaaattaaacataaaatcaaacctagcattagcaaaaatgccgaaaaaaatattaaaaaaaatactgacattattccagaaatgttaaaatctggt

SEQ ID NO: 83 - DNA, 500 bp, Ctenocephalides felis
  misc_feature (7)..(7): n = unknown
acagggnaaaacacaattatgccatacattagctgtaaattgccaggtaaacatatttcacaaagaattatcagtattataattaactgcattatctataacaaaaatatcttatattccataagaattttaaaatagatttcattacttttcaaataattagttattagttaaaatattttctagatttattttaaatatatttttgtgttaaattcaataacatcaaaatattaatgttttctcacaatctcgtaacagaataattattaattaaatattcttaaattaattctttgcagttacctatagatcaaaatggaggtgaaggcaaatgtttatatatagacactgagggaacatttcgacctgacaggttattggctgttgctgccgttacaaattatctggtagcgatgtgttagataatattgcatatgcacgagcatataatacagatcatcaaacacaacttttaatatatgctctgcaatgatgtc

SEQ ID NO: 84 - DNA, 500 bp, Ctenocephalides felis
  misc_feature (423)..(423): n = unknown
  misc_feature (441)..(442): n = unknown
  misc_feature (456)..(456): n = unknown
  misc_feature (466)..(466): n = unknown
  misc_feature (481)..(481): n = unknown
actcgcggtatacgctcttggtgtcagatttttcttcgtgtttggcatggaccaatagtttattgtcgactgtcttgacaacaatttcttctggtgcatattgactaacatcaaacctcaatttcagaactttgccatcggcgtcctcacggatcaatggtgaattgaggtcgtccaaccacgtgctgacttgtctgcctggtgcgcccaagtttgagctggacagcctttggtcagtggaagtttgttgtgttgtgctgcttgtgcttttgaagaagttattactttctctattcataagctcggatctgaatttagacatttcctcttccattttcttcatttcggcatcaaatctttccctgatgctgctgaattctgtatcaattacactgaaatctccaagcttgattgggatatcgngtttaaatccactatcanncatttttataaaantttatttaanattcacatcacacanaattaattaattggtaaat

SEQ ID NO: 85 - DNA, 413 bp, Ctenocephalides felis
  misc_feature (26)..(26): n = unknown
  misc_feature (30)..(30): n = unknown
  misc_feature (324)..(324): n = unknown
tgcagactgcttctaattctttttgnttgngttcgtattcttccttatcggccaattggttagcatccaaccatttaataacatcattgcatttgtccataattacagtcttatcggtttcggcaagtttatccttcaatttttcatcttccatggtggatttcatgttgaagcaagtaagattctaacgagttcttagcagcaattgtagacttttgtttctcatcttcatttctgtatttctcagcatcgttaaccatcctttcaatgtcttcttgctaagacgacctttgtcatttgtaatggtgattttattttccttgntggttgatttttcaattgctgtgacattaagaataccgttagcatcaatatcgaaagttacctcaatttgtgggacaccacgaggtgca

SEQ ID NO: 86 - DNA, 500 bp, Ctenocephalides felis
actgcaatcttcatcagatttcgttgcagtgtttgaaagatttttgaatgctgaatctgcaccagatagacctaacaaaatgtatatcatatataagtataagtttttgataaagatttgtgatactatataactaatttatttaatttaggaagaggaatttatgaaaatattgaaacaaaaaactattttttattcaagcataatatttaattattaattagatcgataattaacaaacaatcaaaatagttccaattcaaatagaactaacctcttatctgcagtgtctctgcacattttaaaagatcttgtagcccttcttgtgtaacatttacttcccccttatacatgaaatcaaccaacgcttgtaattcccaaaacctaacatctttcaaaattataattggatgctggcaaggattttctcccagtagactttcaaaaaatccagaacaagcggccaaaactaacctatgacaagttagtgacgccttcca

SEQ ID NO: 87 - DNA, 550 bp, Ctenocephalides felis
  misc_feature (435)..(435): n = unknown
atttttctgacaacagactttaaaataacatttaaactgtccgattcaattatttgataaaaatgaagacaattatagttttcgcactaattaccattgcagcttgcaaagggcaatctacttgccctaactttaacgatacacaacatgacactggcagaatcgctcttatgaagaaatagttgatttgccacagaaaccagaagttttacttattgatgttcgtcaaccggaggaattggagcaggaaggaaaaattccgacggctataaacattccattacgtgaattggaaaatgctctcaagaacatgtctcctgaagaattcaaaaccaaattcggaagagataaaccaacattcgatactgaaatcatttttagttgccgttccggaaaacgagcaaaggaagctatggaaacagcattgggattgtntacaagaaatcaagatctacgaaggtagctttttagaatgggcacaagcagaagaacagtgaattgcaggtaatcaattttttatgtcacatttattacaattgaccaactagtt

SEQ ID NO: 88 - DNA, 549 bp, Ctenocephalides felis
gatagagtgttcgtctttggtttaggaagttacatataattattcaagatgcctgaagatacacaaaacgctggtgatgtcgagacattcgccttccaagctgaaattgctcagcttatgtctttaattattaatacattctactctaacaaagaaatcttcttgcgagaattgatctcaaattcatcagatgctttggataaaatccgctatgaatcccttactgatgcatctcgcttggacagcggcaaagatctccacatcaagatcattcctaataaaagtgagggcacgctcaccattattgacacaggcattggcatgacgaaagctgatcttgtgaacaatttgggtacaattgcgaagtctggaactaaagccttcatggaagccttacaagctggagccgatattagtatgattggtcaatttggtgtggttctactcggctattcgtgtgataaagtcacggcacatctaagcacaatgatgatgaacaatcctttggaatcttccgcagaggtccttacagtaagactgcacttgacc

SEQ ID NO: 89 - DNA, 549 bp, Ctenocephalides felis
agtcgttcgagtctggttctgtaacaggcggcaaaaagagaaacgcatgacgcccccgaacacgatgggcagcgacgtctccgaaagtctcgtgtacaacgcggcctacgaccagaacttgggccacagcctggtccacaagtacgaggacatgcccggcggaggcggaggcgcaaggcacttggatgacacgggacgacacctggaacacggcgtgtcgcacctgggccacgaaatggccaacaagttcgaagggcacgacatgggacagaacctgggacacaatttaggccacaatctagttcataaattcgaagacggcagcaggcacatagagcagaacctcgagcctagttattcggaagcgcagagtcctggcaattagcataggacgtgtaaatacgtgagttagggacataaattcaagtgactgattagtgactgaacgatgttataaatgacaacgtgagtgcgaaaacaaaacgtcttgacgaagaaatatcgttaaagtaaaaaaaaaacaaacaaatgaaataaccaggggtaaaa

SEQ ID NO: 90 - DNA, 549 bp, Ctenocephalides felis
acaagttcccgaccggtcgcttcgcaaaacggattctaattaaaatttagtgttttaaagcaagtgttacgtgttcttgtgagtgtttattgtgtgcaaaaatcgcgccgagatgtccgacaacaaaggagagaacgccacatcggaatcaccgaagggcaaaccgggcagacgaaacagagctttacaaagaatgaaagaagagggtgaagcactaattaagtctctaggtggaacccctgaaattgaaggcagaaggcgtactaggtcttcactaaaaacgccagcaacacccccagttacgcccccaactcccacgaaaaaggcaaaatctacaccagcacccaaaggcacaaagggacgcgggaggggaagaaaaagtgaaaaggtggaggaggccgaagaaaagcaagaatcaacagaacaagaagacgaagtagacgaatccaatgcacttactaaattcacctccgaagacaaggccaagtagaacaaaatgtaaaacagaagaccttcagaagaaccgcaaactgatgactgttaatccga

SEQ ID NO: 91 - DNA, 251 bp, Ctenocephalides felis
actcttcccacagtgagagaaaaagtttaagttctattcatcggtcgtctaaggaaaccactcatcagcagattgaaactcaatctaatgcacgaaataaacaccaagtatcatcatctaacgctacctacgttattgaacgcccgcagaaaaccgttcgacgcgataatctgttaactggcggtgaattttatggtcaaaaagattcaaggtatggtaatttttctaattgtgaacaaagtctaagaagt

SEQ ID NO: 92 - DNA, 375 bp, Ctenocephalides felis
  misc_feature (327)..(327): n = unknown
  misc_feature (366)..(366): n = unknown
actccctttgcgccatgaagatttcaggcgcatttcgagtatcaagtccgccttccatgtccagaaggtcctggtgttcgtcctgttcgtctgattcggatgagtcgtccagttcgtctccgtctaatgaggacggacaacggaacatatgctcaccgtcgcacatgcattgctgagccgcctggtagtcgcggctgaaggctgcggtgttctcgaagttctcggtgcaaccatgctcttctgttaatccaacaggacagggattaggtggattacaataagcgggcaaattatccgtttttacttgctgatgattcattgcacttncatctggtttgagcctttgttggccttcaccagcgcctncacttacgt

SEQ ID NO: 93 - DNA, 550 bp, Ctenocephalides felis
  misc_feature (527)..(527): n = unknown
gcaaaagcaatgactgtatcaaatggcaatttagtagatgttagattttttggagcacatgataaagcatggatacctatgaaggattgcttgctttatagtgagaaagatccaaatttcagtgataaaggaaaacgctctgatttcatcgaatcacttagggagttagctatatatgtgaaaaatcttgagcaaaaatttggaaaattttgtcatgcaccattcaaaactccatatcctaatgatcaagcagctatttatagtataatgttaccttcatataaattcaaatcagatattgcaaataaaaaaataataacaaaacaaaaagtttgtgacataacggataaactactagaggacacaaaaggtaacatgaaaataaataattcgttagatgaggatagttatattgaaggatatgatactgaagatgaggaagcactaaaagatgtatcaaatgaatctgtgatatgtaatgatatgaaaattaaacaaacccttgcgtgccgtgttagaatgagagnggtaaataattcacaggaaaata

SEQ ID NO: 94 - DNA, 549 bp, Ctenocephalides felis
aacacaccaagagtacaacattcgtcgtgctggatatttgacattattgtatacaaatatagcggcacacgatcgtatttattcgcgaagttttgacacattcagcagatttttggatacatacagcaattcaggagttatccgctgaggaaatcaatttgagcgcaattagacgatcagatcgtatacgaatcaaaaatcaattaattggcagtgattttgtcaggccattttagttaacggcgcgcgtttgttatacttttaactttgaaagttttctccatcgatagttttcgttaatcaacgtgaggaaaagttctaatcaagatggcagtagcagcagcacaaaagaaccgcgaaatgttcgctatcaagaaatcctacagtatcgagaacgggtatccatccaggcgccggtcgctggtcgacgacgcgcgtttcgagaccctcgtagtcaaacagaccaaacagtctgtcttgaagaagccgccagagagcacgattcgagtctcgatggcaagaccatggacagatgtatatgatgacaag

SEQ ID NO: 95 - DNA, 240 bp, Ctenocephalides felis
acttgtaacaattgagatgttaaacgcaatgaacagtttgtctgaaaatcaatctcttcttgctatgcccccatggcaaaacatgtggttggtaggatccatggctctctccttcactcttcacttcgtcattttacatgtagaagttttatcagctgttttccaagtaactccattgtctcctgatgaatggatcactgtgatgaaattctctattcctgttatattgcttgatgaagt

SEQ ID NO: 96 - DNA, 431 bp, Ctenocephalides felis
acaataggaagacatagatttacgatcgcgagagaattcgagagtgaactcttttttccatttggtttcaatttcctggcggacggcgatggcagcagaacgacggtctagtccttgtttagaaacattgaatggattcattttttcagccaatacaatcaaggcggtttcggtagcttcaccgactttttcgaaagcttgtttgaattcgttgaaatcaatagcggaatcattgcacatgatacagattgttcctaattcatgcagggtgtcaaattcgctggccttaactttagcacctttcaagtatacatcaccaattggttcataagtggatccagtgatttcgaattcagtgaaactgctatcgctaccttcaattttgtcaaagacaaacatacgagatcagacatctgattagtggtcaaagt

SEQ ID NO: 97 - DNA, 500 bp, Ctenocephalides felis
actgcgagacactaacaaaactcaaaaaagccattcaaaatcgccggagaagaagaccgagcaagggcgtggcggcgaagttcttcgaagcgggttttcaaaagtgaaaaactctttagaaaaaatgcgatgaaagatctggcgactatgtagaaaaataatttgaaatacaagctttccgatggtatacacatttattgcaataaaaatgcctcaaccctgaaaaaaatgtgggaaccttactttttgcatgaccctcgtatgatttcaaaaaattgagaatgtctatcgatttgttacttagacgtgtcctttgtttacaatatttcccaaaatagaaaatactctcttacttgcgaccgaacttgattgttgttaaagcctgatatactaattctatatacactggtataaaacctaaattaatatatacattagacaaaggataacacaaaacttttctggaagccatagcagactgataagattccaaatgctga

SEQ ID NO: 98 - DNA, 350 bp, Ctenocephalides felis
  misc_feature (71)..(71): n = unknown
acgcgtaataataaaaagagagaaaatatttaaaataaaaatatttaaatttaaaaaagaaaagaaaaacnttatcaaaattattaaaaccaattcattattgcatcatcttacaaaaagacccgaaaatacacgacgttaaaatatgaaataagaaaaaaaaactctactaatactaccaaccaattactctataactatttattatacaacaatccagctggtcagatatgaatagcatgcctatgtttcaactatttgaaaaaaagtaagtccttgttaaactaacaaatccgattcggcactgtctgcctggctcaaaaaacttcggctctctgcacgcgtttcgt

SEQ ID NO: 99 - DNA, 200 bp, Ctenocephalides felis
actgctgtagctaaatctgcttctgaaatggtgttagctgatgataacttctcttctattgtcgctgctgttgaagaaggtcgcgctatttataacaacatgaaacaattcatccgatacttgatttcttccaacgttggtgaggttgtttcaatcttcttgactgcggctcttggtcttcctgaagctttaatccctgt

SEQ ID NO: 100 - DNA, 273 bp, Ctenocephalides felis
  misc_feature (44)..(44): n = unknown
  misc_feature (46)..(46): n = unknown
catcttacatctaccgggacatcatagctacaaaaaatttcttnangataacaaacaattattagtgtgtaaggcagataaaggaaacatttcagtggttttgttaaaagaggaatatgataaagaagcaaagaaaattctcagtgatgaatctctatatgaagaattggcatcggatccgaacaactatcaccatagacaagtttttaaatttataaatttattagagaaaaagggacatattaataataccatatcattaaagttaaaagt

SEQ ID NO: 101 - DNA, 550 bp, Ctenocephalides felis
aagaatatgaacaaatagtagtagcaccagttcaccctggtttagatgtacaggaagcacaactaaatgaagataatgaggatttcgcatcaaggcgtcgataccatcaatcagctactgtgcatggacattacgtaaacattgacggatagttgttttaattaatgatcacctaatacatatttgaccagtattgcaaatttttgagtcacaaagctattgatttagatttttatatatccttataaaagctatttctatggtataatttatttaatttaacaaaaatttgcaatattagcttgtattttaaaaagctgattaaaatttattgtgaagtatctaatttattaaaaaaaatctaatataatgaataatatagaaatgaatgaaaaccgactcgagtgcagtcaacattactgataatgtgatttgatgcattttgctttattaaaggctaaattagttcaaaaaggccagtgtttaatttaatatttatcacttatttaattcaaataattaatcactccagttgtattataaataatgt

SEQ ID NO: 102 - DNA, 550 bp, Ctenocephalides felis
  misc_feature (493)..(493): n = unknown
  misc_feature (518)..(518): n = unknown
  misc_feature (530)..(530): n = unknown
agcaaccgacgctggcgtcgtttgaacaagacggttttaaacgatttttatattcacctaaagatttctataaaccattctatgaatggttagtaaagcaaccacattccaaaattcaagtacagccgaacgaagtttgatttgttaattagtgtttttgtgcacattgattggattgaaaagaacgccgccaagagcgtaagaagcaatcatggaggacgcacatgcgaaatccgtggacgaagtcttaggatatttcagtacagatcctgaaaggggattgtctactgatcaaattaaaaggaatcaagctaaatatggacctaatgaacttccaacggaagagggtaaatccatctggcaattagtacttgaacaattcgatgatcttctagttaaaattttactgttagctgctattatatctttcgttctcgccctttttgaagagcacgaagattctttcactgcttcgttgaacctttcgtcattntactgatttgatcgctacgctatgncggtgttggcangaaagaacgctgaatcgcta

SEQ ID NO: 103 - DNA, 549 bp, Ctenocephalides felis
  misc_feature (543)..(543): n = unknown
gcttctattcttaaggtttaaattcagatcaattctatatttaaatttcagaacaatcttgagcctttatcatgccttctgatgccaaaaaacgtgaacagcaacgcaagaaggagcaagcgaaagccagacaggctggcaaaaaagttgcaactaaaaatggtgaagaaaatgacaaagaacaatctccagcccccaaccaaactaatggagtgaaaagtaatggaactacagagctctctgcagaagaaattctttgtgcgaaactggaagcagaagcaaaattgaattctgatgccaggtcttgcacaggatctttagctgtccatccacgctcaagggatattaaaatagctaatttttctgtaactttctatggttgtgaattgcttcaagacactcttttagaattaaattgtgggaggagattggtcttttaggccttaatggaagcggcaaatcatcactattgctgtcttggtatcgtgaagtaccaattctgacatatagacatctttcattaactagagaaatgctgtaggntaattg

SEQ ID NO: 104 - DNA, 500 bp, Ctenocephalides felis
  misc_feature (159)..(159): n = unknown
  misc_feature (171)..(171): n = unknown
  misc_feature (489)..(489): n = unknown
acacaaccaaactgttaattccctgcagcgcctgctgagggacgccagaggttctataactttcaaaatcgttccatcatacagaagtgcaccgcctccttgtgaggtaagcgccgcatctgatgcaatgcgtttattccggattaggcctacacctgnattagtatttgngcgtgcccagtttgactatgatcctttggaagatgatttaataccatgtgctcaagctggtatttccttcaaagttggggatatattgcagattatcaataaggatgactatcactggtggcaagcaagaaaggatgctgtcgaagggtctgctggattaataccttctcctgaacttcaagagtggcgaatagcaaatgcggctcttgaaaagaataagaacgaacaagttaattgctctatatttggaaaaaagaattaaaaatgccgagataaatatcttgcaaaacatatgctgttttgatggatggatcttgntacctatgagg

SEQ ID NO: 105 - DNA, 248 bp, Ctenocephalides felis
  misc_feature (214)..(214): n = unknown
  misc_feature (217)..(217): n = unknown
  misc_feature (219)..(219): n = unknown
  misc_feature (224)..(224): n = unknown
  misc_feature (226)..(227): n = unknown
  misc_feature (229)..(229): n = unknown
  misc_feature (232)..(233): n = unknown
  misc_feature (235)..(235): n = unknown
  misc_feature (242)..(242): n = unknown
  misc_feature (244)..(244): n = unknown
  misc_feature (248)..(248): n = unknown
accaagtaacttttaccttcttgtcagaagttttcaaactgcacataaactctgccgatttaccttcttcgatagtaacatcaacaagtcctttaacaatttgtggtttttcgcctttttctggttcaggatccggtaaatctaagatcgttacttcttgtgatgttgcctcgcccttttcattctttacaaccaatttgtaagtacctgcccnctncncttcncnnancanngntgccatnantcan

SEQ ID NO: 106 - DNA, 494 bp, Ctenocephalides felis
  misc_feature (460)..(460): n = unknown
accgtcgtcttgtaaatgctgtgaatgatattgagaagcgtattcctttctctcaccacgatagattaggtttcctcactttctgtcccactaacttgggaactactgtccgtgcctctgtgcacatcaaggtccctaagttggctgctaaccgcgccaagttggaagaagttgctggacgttacaatctccaagttcgtggaactcgtggtgaacacactgaagctgaaggtggtgtctacgatatctccaacaagaggcgcatgggcctgactgaataccaagctgtcaaggagatgcacgatggcattgctgaactcattaagatggagaaagaaatgtaaacatttcacttttatcatcagactattttttgtgatcaaataaatggtcatgcgatagatattggcaaagattctatcagtatttctattttaaataataatttatattatattgntacaactttttttaataatttaatttttatttgt

SEQ ID NO: 107 - DNA, 445 bp, Ctenocephalides felis
acgtaaacatccatacatttagggcagtaggactttaccatagcctctccaggcacatcagaaagacctaatggcagcataggctgactatcgcagtaaactctagggcaatatccgaagtctccagattggtatttttctatcatttgagctatacctctatttgttaaaatatatctggcgtgaattagaccatataacatctctgcagcctgttctattgcatctgactgatttggattatcatctatttcatcatcaggttctaaatctaatatcatatccaaggcttgtctatatcgtggaatttgctcattaaggcctgttagattgaatttatcctgtatatagtcttcatccacctcgcaaaagaattcatttcctcgtagatcacaaaaccaagatatccatgagacctcctcagaactgctcattttccttttgg

SEQ ID NO: 108 - DNA, 500 bp, Ctenocephalides felis
  misc_feature (475)..(475): n = unknown
acaatcgggcacaaccaaagcataatacaacaaactttcatcgtaataattaaatgattatttctatcacttaccgaggcatttttcgcataaaacagagtgtgtcctttcagcctgaaatatcgccttctccatcgctgtaaggaccaggtctgcttcatgagaaatccctctctggttgcggcctgccggaaattaacagaaatccttgtaatacagaaatgtgacaagaatatttaaattggagttgacagtatcgtaatgaaatatcttgggcatgaaaagcattcgaagatagtctataatgggtttaattcaatcagtttcaaaaaataagaatcttgatatcgatataaaatgacaaaagctctactaagattttttcttcagtataaaaaaataatataaaattgttagaatactttacatatatcgcataattcttaacacaatataaaaatgaataatccaaggnaacgaacgtatttaatctcttacac

SEQ ID NO: 109 - DNA, 343 bp, Ctenocephalides felis
  misc_feature (6)..(6): n = unknown
  misc_feature (23)..(24): n = unknown
  misc_feature (58)..(58): n = unknown
  misc_feature (71)..(71): n = unknown
  misc_feature (113)..(113): n = unknown
  misc_feature (140)..(140): n = unknown
  misc_feature (165)..(165): n = unknown
  misc_feature (338)..(338): n = unknown
caaaantgcgtctgagggactgnntcttaatttattcataatatcaaaatagttattnatttgcaaattgntggtaattcactcgcgtttgtttatttataattatatctggntttcttctcgatttgctatttaacctntagcagccttttgcacttttgctgntggtaataatttcctatccgtaacaacacaatgggaaactgggaataatccgtccttaagcacacatacgcaatcactgtgcatttcagttctactaatttggtctaccaaactgtttgatactacactgatgaagttcttgttttgcttttgggctttagcgtgttggaagntctgt

SEQ ID NO: 110 - DNA, 491 bp, Ctenocephalides felis
actcctatcgtttgtaacatttacattcccctttactttattattttcatctcctgctacgatctgcgattcatttgaatcttcaatatttaaattcgctggagcattttcgatttcttcaagagccgtcaacgctcgcagttcttcttctatcaatttctttctagcagctattgcttcaaccgagcttatactttcccttttttcacactcgccgcttttccttgaacgaaaactgcgtctctttcgactacccgagcctcttttcacggttctggaaatcccatccaaatttcttaaaaattcctcctgaggcgttgcaccaggtgtagaccaggttgaccaggatttgacgtcctcctcttcgtctccggaatcttccacaacttccgccttttttagcttttctcggacactcctcgtgtaatcggacaagtccggacttgctcgaccgcaaatcgaaccaacacacagacaactcgcctttcaac

SEQ ID NO: 111 - DNA, 500 bp, Ctenocephalides felis
  misc_feature (465)..(465): n = unknown
acggaacccatgggaatgtaaacaaaatttatacttattgttaaaatctctctaaaatatctgataatttgatgtgcatatgtctaatgatcatttttgaccgccaaatggcacatttttttactttttcctccatatctccaaagtcgttggacctttccaaaattttgaacagttcttcatttagtcaatacaaataaaatgttttttaaattattcaaatcggacgctccgttctcttaaaaactgagttaccgttttcggcactttttgccccgtatcttcggaacggctagacctacctttgccaaaaactaatcagcacgtcttcttatcaatatgaatcgaatgttttttaaattattcaaatcggttgattcgtgttcccgaaatcgtcgacgaaaatttgtatccgcacatacatacatacacacacatacacacacacacacacacacatccatncatttttctaaggatgccaaaatgtcagaaacctt

SEQ ID NO: 112 - DNA, 500 bp, Ctenocephalides felis
  misc_feature (398)..(398): n = unknown
acggtaaacaatgtatccaagattcttatacatatttattgctacttcattactaactcgaacaaacaggtcaacaaaatatgtattttttctttctgatacatcttctaagaaattcattaatttagctgctaagccaagtctacgaaaatctggggaaacagttagggctgtgacatgtccatgccaattttctccatgaccttctgctttgcccattatatatcccattatttctccgtttggggactcagcaacttgaaaatactctggccaatgcgctagatattgcatgtagaatgaaagtccatatgtttctgttagtggatctaaatttacattattaaaattaaacatatcattgcaagtaaacggtcttaatgtagtcatattaattntattgcaaaagatatcagaaggaatttaattaacaaaagtcacgcctttaatgaagtaaaatattcagagaaaaaataaaacgagttactaatatttctact

SEQ ID NO: 113 - DNA, 256 bp, Ctenocephalides felis
  misc_feature (67)..(67): n = unknown
cgatcattttcaaatctagataatcgcacacattggtgaaacttcacatcctcaagttccacagatnttgacttacccctgcctgtgctttcaaatagaactttatcatttaagcctaatcttaattctggcattcctgatagatatactctcattttgatagcaccgacaatttcacttcttagaacattgccatttacatttgccaaaagatttacggattctattacatctaaaaatacttcattttttcggt

SEQ ID NO: 114 - DNA, 550 bp, Ctenocephalides felis
  misc_feature (521)..(521): n = unknown
ataaggataaaaagaaaaggaaaaaggagaagaaagagaagaaattgaaaaaattaaagaaaaaattgaagaaagaaaaactcaagaataagaaaacagaagattcagacaaaaagaataaagatacgaaaagtctcaaaaatgtggtatcctcatcctcttcatcatcttcggaaagctctgattcagatgatgagaaatcatgtatcggtccagtgcaaaaacaaagtgctggtcttagtcataaggactttggacatgcattgttacctggtgaaggagctgctatggctgcatttgttgctgagggaaaacgtatacctagacgtggtgaaattggtctcacgtctgatgaaatcgcgcagtatgaaagcgtcggttatgttatgagtggaagcaggcatcgtcgtatggaagctgtcgtatccgtaaagaaaatcaaatttattccgcggatgaaaaacgtgctcttgctatgttcagtaaagaagaaagacaaaacgtgagcataggatcttagncagttaaagagatattaattcaagtatcc

SEQ ID NO: 115 - DNA, 549 bp, Ctenocephalides felis
  misc_feature (4)..(4): n = unknown
  misc_feature (33)..(33): n = unknown
attnagagtagcagcttcaaagatcaggcgttncacagaaggtacttcgacgtcttggaagatccagaagccaaatcaggagtagtgcgagcgcgcaattcaccagtcattttgaccaaagtgggagtcttcaaagagtagacgaagggcataccagtttccaaggggaaggcaatggtgataacatcgcggttgtacaatttagtgaagtcgaaagattttccttgacggagagattcggcggcggagcggatggctttgggcaaagcgttcaaggtttggttgtcgaaagcaaagaatctcttggtgttcaacatgcgagtggaaatgacagcttccaatttttcagcttcttcaggtttcatgttcaacattttggcgattttttcaacagaccatttgtcttcagaagagtggtcgctttcgtgttcagattcgcggttcttgaattgagcagaaactacttcaaccaatctttcaacactggagaccatggcgtagacatcggagtatctttgtttgtatccggcgaagtcagcttcaagcttg

SEQ ID NO: 116 - DNA, 549 bp, Ctenocephalides felis
  misc_feature (503)..(503): n = unknown
gcgaagagagttagatcactgtagaagacagatttcagaacagtccggtcaaatatctcgtttacaatctgagttaagtattagccaaaaaaatgaaggacaatatacaacaaaattagctacagctttggaaacagttgaaaaaaatatggcacggagcaataaaagggcaatagatgctgaaagtacagttgcaaagcttaagaaacagatttcacaaatgacgtcagagatgatggttcttcgaaatgaaaatacatcactgcgctatggtccagctgcaaatgattccaatagcatgatgagattatcaaatgagttgcgaactgcagctagtactgcagagtcgtcactgaggcaactattaacgggtgttgataatttaaggactcttgtagttctttagaaagctctaaccgaatatttgaaccttctgatgacaatttctgcgaaaatgaagatgaagatgccggcctgactataatgtgtagtgaataaatttntcattcaaatgtcttgtattaaaataaatattctagtttatatgct

SEQ ID NO: 117 - DNA, 549 bp, Ctenocephalides felis
gaaatatagagaagttactaagaaaactatggttaaacagtttgaatgtgttaaggatcacccgacgccaaaagctgtgttctttacttgtatggacagtagaatgatacctacaagatttacagaaactaatgttggtgatatgtttgttgttcgaaatgctggtaatttggtacctcattcccaacattttttggatgaatatataagtgctgaacctgctgctttagagttaggttgtgtagtaaatgacattcggcatataattgtttgcggtcacagcgattgtaaagcaatgaacctgctatataaacttcaggataatgctttcgcttctcaggataataggagaatatcaccactacgagcatggttatgttcgcatgcccaaagcagtctggataaatttcaacaacttgctcttagtgattataaaacacctcttatttttactgctgagactcctttaagaaaatttgtggttatatagatcctgaagatagttttctgtgaagacaaatatcacaggtaaatctctgcacaactcaa

SEQ ID NO: 118 - DNA, 549 bp, Ctenocephalides felis
  misc_feature (505)..(505): n = unknown
cacaacgttgagttatccttgtaattgcaagtgcatttaaaaatataatttgtttggcatagaatttgtgaaaaaacaggagcataaatatgctttcaaacattcggattcaaataaaaattgcccgtgtacgagaattaaaagatctgcgttatttttcttcttctacaacaaatttcgctgaacacaaatgtcgggtattggtggtcggaggcggctctggaggatgcaccatggcatcaaaactttgttcacatttgcgacaagatgatgtcattgtattagagcctagtgatgtccattattatcagccaatgttcacaatgattggaggtggcatgaaaactttggaacaatctcgaaggccaatgtcttcagttttacccaagaaggctcgctggctaaaagattcggcgaaaacattcaaaccgatcgaaaattcagttttaacatcatctggtgacaagataacatacactatctcgtgtgctgtggttgaaacttnttacgcaagatcctggttgtaaaagctttgctcaccaaatggca

SEQ ID NO: 119 - DNA, 549 bp, Ctenocephalides felis
  misc_feature (483)..(483): n = unknown
  misc_feature (521)..(521): n = unknown
  misc_feature (547)..(547): n = unknown
aatatgtgtttactatttaatgatactgtaagaaaaaacgatacgtacgtaattctgacattgactgtcattaataatgggatatgactttcgaggttattattgagaaatgaaaacgtagcatttacttatagtacgttatatggtttttgattggtttaaataaactaaataaaatgaagtgcaacaataacgatacgaatggccattcaaaaaggcatttggaagcgaagatctccgaagctgaagaggtaatagaaaaatctttatctcaatgtgaggcagatgaaatttttatgtctttcaatgggggcaaggattgcactgttttattacatatactccaaagagtttataaacttaaatatggttctgatgcacctccattactctgtttatatgtgagacctaatgatccttttcctgagatagaaagttttgtgctgagtgcaaaaatctgtccccataaatctaatacatttnctcttccttaaaactgctttaaaagatctgcagtgcgnacctcactcaaactagttcatggatncg

SEQ ID NO: 120 - DNA, 549 bp, Ctenocephalides felis
gactaccaaatggtgttcaagctcaatgtcgtgcctttgttgatacatatggagatgcctttattgccatatttgtgcaagaattagatccatcgcaggtgtgtcccaagttatctttatgtccaaataaagaagttgaagtgtttgaacaagaagataccagagacaaaccaacttgtcctatgtgtctaatggctatgtttgaattagaagagaagcttaaggaggataaaaccaaggcagctgttgagcaagcactatctggattatgcaatcatctttctgatcatctgaaacctgcttgcttaaccttagtaaatacttattataatcaattagttgaaatgctgatggctgattttaaaccacaagaaatttgcgtgtacctaagattatgccatgataagaatcccgacttaagtgaattggatattcttgtgcagtaccaattaataagacccatgattaatgcaaatgaaatattggacaccacaattaatggcaaaccatcaggtgtgtcaaacaacttattctgaaaattttgccaac

SEQ ID NO: 121 - DNA, 549 bp, Ctenocephalides felis
  misc_feature (526)..(526): n = unknown
gcataatgataatccacatgtagaaaaacaaattgttgagttaatatatgatgccgtactatttgaaaacttgtcaaaaaattataaaaataccgcattgtggcaagaaatttttgttttgccattctactccctatataaggagaatttgataaacctaatagacattttacatatagatacaagatatgcaattgaaaataaattacaccaagcagccagggcaaaggcactgtattggactcatgcactttattattttgagaaggagttaaagtactcgtcaaattctccaacgtcactaagttttgatgtagaaaaattatataaaagggttctttgtaaagagaattcagatacaaccgatcttggctggatacatatcacacagatattcaaaaatttacccgcagaatgcatatctgtaaaatttgatggcaaaatgattcatggataagttccgctggaaccaactgtgccgccagatgtatgtcagagtccgaattacgcgatgattctgtactcnccgtcgagataatgatgtctctg

SEQ ID NO: 122 - DNA, 339 bp, Ctenocephalides felis
  misc_feature (70)..(70): n = unknown
  misc_feature (312)..(312): n = unknown
accatggctgatacttcaattccggcatcaggatggtattttccatctttcatcactccaagtttcttgnaaacgcaattgatcatgcattttcctgcttttgaatctggtatgttcttctgcaataatttttcgatatcatctgaagatgctcctgtttctacagcacaatctttgcctatctgcaaaagtttttcctttgcttcttctttggtatagctctgccgcagaatataaagcgaccagtgttccaatcaccaagaatatcttcattttgattttcttctacttcaaatttataaaacaatttgnttataattttcaaatgtagtatttact

SEQ ID NO: 123 - DNA, 500 bp, Ctenocephalides felis
  misc_feature (449)..(449): n = unknown
cccgcacaccacacatacatcaattttttctgtgggtgccaaatattcagaaaactcaaaaacgtaaagatatataaaatttttcattttcgattttttgcgattactataacttgccccatgggaagttaataatattgtgtagttatttatgatcaatactaatattatgtgtagtaatccataatcaagactttttatcatttttaactttccgtggggcaagttatagttatcgcaaaataatcgaaaatgaaaatttgatatatctttacgtttcaaaattttctgaatattttggtataccttagaaaaaatggatgtatgtgtgtatatgtgtatgtgtatttttttatagaggtgcgaaaaaaaatctccataagcagacaacgctagacggtagtgtgaagatttttgcgacgccttcttcttactactggccctttctncggtttattcttcaaaggtgctgtgcatatgctgctaagctgccagtttct

SEQ ID NO: 124 - DNA, 489 bp, Ctenocephalides felis
  misc_feature (62)..(62): n = unknown
acttaaactatgagctattctgtaactcattttttttatctttattttgtaaaccatcttgntcataaaatttgctaactacgcatttactttttttttgacctatatattttatctaaatactattcctaactctattctatctgggcgtgcattaattgtataaaagagaaaaaaaaaacagtctaaacaagtaatttctattatataataaatctcgcaaaagaataaagaaacaacagatgtaatacataataattatatcaaaaatagtcttactgttattataaaacatttgtaaagcgaatcgggcattgaatttaaaaaaaagaacaattattaaataatctcactatttaacctatgtgttatacggtaactcgccatttttttttctcgctttactttcactttgcaaactatctctttcctaaatcctagcgacttatgcattcttcgctttcgcttatttcatttattacatctagt

SEQ ID NO: 125 - DNA, 549 bp, Ctenocephalides felis
  misc_feature (485)..(485): n = unknown
  misc_feature (522)..(522): n = unknown
gattagtttgtagttaataattattaaaatgaacgactacttatcttctcctttaggatcagattctagtaatttagatgtgccagctcctattaaaactggaaagactgcatatcaactttctccgtatctaaattataatcctgtttacctgcctgcaagccaacccgaatttattttccctgaaggggctagtagacaaaggggtcgttttgaattagccttttcgcaaattggatcatcatgtatgataggagctgctttgggaggcatggctggtacatacaatggtctgaaggctacaacattgttgggtcaaactggaaagctgcgaagaacacaaatgttaaatcacattatgaaacaaggttcagctacggcaaatacactaggaacgatagcagttatgtattctggacttggtgtgctactgcatggcttcgaggagaagatgacgaaataaatactttaggtgctgcacagcncaggacacttataaatcacagctgacttaggaatgtncattggtggaggagtagatttctatac

SEQ ID NO: 126 - DNA, 549 bp, Ctenocephalides felis
ccggataaaagatatttattacaatggatgattcctcgccagatttccatttcaccacgatcgattattgtgtttttggcctggccctgttcgtttcggccctgacagggttgtactacggatgtaggaaatcaggggatgaatctgatgaaaacaatcagcagaacagcaataaaagaacagaagagtttctaaatggaaactccaattttaggcctctgccagtggctgcctctcttgtcgccagttatgtgtctggtgtcacgattttgggaacaccttcggagatatttcggtacggaacccaatattggataatagtgttgccaatcgctctgatgagcctagtggtggccaatgtttttcttccgatgttctgcaagttgcaagttcagagttcctatgagtatttagaaatgagatttaatccgtggtgaggacgatagcatccgtcatgtttgtcatagacgagctttgttctaccaattgtatatatgtgccagctttagcttttaatcaagtcaccggtgcgacgtcatggattgtacc

SEQ ID NO: 127 - DNA, 549 bp, Ctenocephalides felis
agattttaaggaacctttacaacctgcgaaaactgtcaatattcagatcgacgcggtattcagtaaagttttagtaccttatccatcaagcataattcaactagagcgtcaacttgtactctatcatggaaatcattacttttactctgcctatcgtactattaaacaacaaacaactgtacaacttgcttctaagaacatcgaaagcttctctaaactgaaaccattttcacaaagtgataccacaataacttatggctcatatgaaaacataccagcatttactcatgacaaaatgacgattcattatgagaatcatacaccgtttttaacagttacaaaattggaaagaacaattgaagtatcacattggggaaatattgcggttgaagaaacaattgacatggtgcattctggtgcattactgaaaggtcgtttccagatatgaattcaaaaagattcacgaacggttggaagtgtaaatcatataaaacttgcttccagcttctgattggggtactccggatctatggaatattctcatcaata

SEQ ID NO: 128 - DNA, 307 bp, Ctenocephalides felis
accattgtggatgaggcaaatcccatataccatgatgaagtttgcttgtttcgaaagaacagttgaattgttatacactcatgtggttcccaaacccagagcagagtgcactaaaggtgaacaattggttgtcacctttgctgctggttacattgccggtgtattctgtgcagtagtttctcatcctgcagacacagttgtttccaagctaaatcaagacaaaggagcaacagccattgacgctgccaaaaaacttggctttgctggtttatggaagggattaggacctaggatcatcatgattggt

SEQ ID NO: 129 - DNA, 440 bp, Ctenocephalides felis
  misc_feature (1)..(1): n = unknown
  misc_feature (34)..(34): n = unknown
  misc_feature (420)..(420): n = unknown
nctcctggccaagaaacaagattggattgcattncatgcaaatgcgccagcgatggaacagggtacttttgcacccgccaagcatgtgctccagttcaccatcataaacgatcagctgaagaagtgaaagaagtaaccacaacttctttggcaacgactccatgcactcctggagagaagactcaaattgattgtaatacttgcacctgtgccagggatggctctggatacgcctgcactcgcaaaatgtgtttgccagccacccacgatcgtcgacgtagagaagctgaaactgaagaagtcaaagaagtcacaactgatactttggcaaccactccatgcaaagcaggagagcaaagacaagtggactgcaatacctgcacctgtgccgcggatggaactggatatcaatgcacccgncaagcttgtgagtttgcagt

SEQ ID NO: 130 - DNA, 500 bp, Ctenocephalides felis
acatatgatgctacatccattttgacagcatttcgctggaccccgacattgagcgtctgtatggcattctcgagaacatctatctttctcatgtccagcaacaaaactgactggacaagatcctggtttgttttctaatgaaataattattaaaatagatttattcttctacatttattctaaataaaaatatttttattttaataaagacatagcctatggaacgaaacttaccgagccgacattctccaatgaaaactgttctaccggaaacttcatctcgttgcaagtctattccgcatgaacttccttcgtgacagcggatatcagaacaaggatcaaagcatgagcattgaacacaattatttttatccacagatttatgaattccgtaaggacaacgtaattcttcacacgatcgatcgtcattgatgcaattgttaataatattctctaaatgaaaaaaacaaattagcaatcattaaatcttcttaaaaata

SEQ ID NO: 131 - DNA, 376 bp, Ctenocephalides felis
actaattgtggccccgccaatttcaaaaatgttgatttagtttgagctgcacatgcacgagccaataatgtttttcctgtcccgggtggcccataaagtaaaacgcctttgggtggatgtatccctaaatttatgaacttctctttgtgcgtcattggcaatacaaccgcttcaattagttcttggatttgcttgtctaagccaccaatgtcagagtattgttctgtaggccgctcatcaacctccattgctttgactcgagcatcatattcagcaggtaatgtttccaaaattaaatatgagtctttgttgacacctactaaatctccaggcttcaattgttctggatctactaaacctataacaggtagaaagt

SEQ ID NO: 132 - DNA, 500 bp, Ctenocephalides felis
acggaacccatgggaatgtaaacaaaatttatacttattgttaaaatctctctaaaatatctgataatttgatgtgcatatgtctaatgatcatttttgaccgccaaatggcacatttttttactttttcctccatatctccaaagtcgttggacctttccaaaattttgaacagttcttcatttagtcaatacaaataaaatgttttttaaattattcaaatcggacgctccgttctcttaaaaactgagttaccgttttcggcactttttgcccgtatcttcggaacggctagacctacctttgccaaaaactaatcagcacgtcttcttatcaatatgaatcgaatgttttttaaattattcaaatcggttgattcgtgttcccgaaatcgtcgacgaaaatttgtatccgcacatacatacatacacacacatacacacacacacacacacacatacatccattttttctaaggtatgccaaaatggtcagaacct

SEQ ID NO: 133 - DNA, 235 bp, Ctenocephalides felis
accaccccccaaaacaccattaatctcacggaacgtttctctagcggatttgcctttaacgaaggaaaactttaaaatagcgcgaatttcggcgtaagtgaactccatgtttacacgtctataactgttaaacgcaatatccaaactaatcatgcatagcatcgttttgtaggttatgtcaagacctttcaaattatgtatagtattgccagatacgagctctgtagcgctttgt

SEQ ID NO: 134 - DNA, 500 bp, Ctenocephalides felis
  misc_feature (258)..(258): n = unknown
  misc_feature (312)..(312): n = unknown
  misc_feature (343)..(343): n = unknown
  misc_feature (391)..(391): n = unknown
  misc_feature (411)..(411): n = unknown
  misc_feature (426)..(426): n = unknown
  misc_feature (433)..(433): n = unknown
  misc_feature (438)..(438): n = unknown
  misc_feature (445)..(445): n = unknown
  misc_feature (461)..(461): n = unknown
  misc_feature (464)..(464): n = unknown
  misc_feature (490)..(490): n = unknown
  misc_feature (496)..(496): n = unknown
acatgtctatatttgctatattattaccctacacaaatccttttcgatataatcattacatagtatcactagctcatcatgttatagctgcttggtttttaaaatgcaggctgcctttcaggagagattttgtaaaatttatcaccacggtatgtgtgaaatataacaattgtgttaacttggtagtaaacaaaatatattaatcaattcatgacgtatagggcctaaaatcaaattgcattgcaccatttgaggaangaaggatattaattaaaccagaggttacaactttgaatgaagaatcatcttacngaaaaagaaagtctaggttaacagaaccagntaggtatttggaggttttcataagaaaaatgggtgaaatggtaaatgncaccccaagttttattggcngccaaaaaaaaatgntttgcanattancctaacntccaaattttgggtantgnataatttttaatttaccataatctangggttnaaaa

SEQ ID NO: 135 - DNA, 500 bp, Ctenocephalides felis
  misc_feature (15)..(15): n = unknown
  misc_feature (364)..(364): n = unknown
  misc_feature (432)..(432): n = unknown
ctacgatatttctgncaagtcgaactacaattttgaaaaaccattcctgtggttggctcgcaagcttattggagatcccaacttagagttcgttgcaatgccagcattggtgcctccagaggtcaccatggacccagaatggaaacagaagatagagaaggatctgaaggaggctcaagaaaccgctttgccggaagatgatgaagacttataagttactttgttatagacaacatgaatgttttgtatattttgttaatgaaaatggtgggtttgaatttgaataatagagaatgggttctgcaaaatgtcgtgaaataattattttaacgccagatgtatttttttattcttaatcatctgnaaagtgaaaaatttaaaaatgtgagtgctgtaatcatgaatgctgagtgtaatataactttttaaagnaactcgcctaatttttaattataatttaatataatggtaaccagttgcatccaagtttcagtggtatg

SEQ ID NO: 136 - DNA, 550 bp, Ctenocephalides felis
atatagtggtctattaaagaataactgctgaataataaattaaacagaaccaatggctgcaattcgaaaaaagttagtgattgtcggagacggagcgtgcggtaaaacttgtttgctgattgtatttagcaaagatcaatttccagaagtatatgtcccaactgtttttgaaaactatgtggctgacatcgaagtcgatggaaaacaagttgaacttgccctttgggataccgccggacaagaagactacgatcgcttgcgacctctcagttatcctgatactgatgtcattctgatgtgtttttctgtcgactcacctgattcattagaaaatattccagaaaaatggactccagaggtgaaacacttttgtccaaatgtacctattattcttgttggaaataagaaagatttacgcaatgacccaaacacaatcaaagagttaagtaagatgaaacaggacctgtgaagccacaggaaggcgtgcctggccgagaagataaatgctttgatatttaaatgtctgttaatcaaaagaagagtccagagt

SEQ ID NO: 137 - DNA, 549 bp, Ctenocephalides felis
  misc_feature (507)..(507): n = unknown
attaccaagtaccacctgaaggaaggatccttgtgggacataaacaattacctcgagctctcaccagcaccaaacggtgacagaatcgagcaaatcagtgcaaacgatcacccacaaagatcaattagattctatgttaggaaacttacaagcagacatgtccagacaaggtgttaatactgctcaaaaaggaagctgtggtgcttgtgacaaagccattgttggccaagttataactgctcttggcaaaacatggcatcctgaacatttcgtttgcaaccattgcaaccaagaattgggaacaagaaacttcttcgaaagagatggacacccatactgcgaacctgattaccataatttgttcagcccaagatgcgcgtattgcaatggagctattttggataaatgcgtaacagccttagaaaaaacttggcacacagagcacttcttctgcgcccaatgtggtcaacaatttggtgaaaaggttcacgaaaaagatggtaaccntattgcgcatgctatttcgattgttgtcccaatgtggagatg

SEQ ID NO: 138 - DNA, 549 bp, Ctenocephalides felis
gaacgcccaacgagtgcaagatttattttcgtattttatttcggtttattgtgcaaacatttcgatacttttgaagtattgagaactgtgaatagtgtttctgatttattatttatattcatcagcgcttgatccaagaaaagccttccaaaaatgagtgtcgctcgctatgaagatattgttgcaggccctttggccaaatttttgagcctttcaaaaagtattggcggagatgttgcgcagcaaactgtttttgtggagaatgcctttaaggcacaattagcttttatcacaactgctagcactgcatcacaacctgctcctgatgtcttacaacaattattgcaaccgaccagccaacagatattagcggctcaagaatttcgagaaaagcatcgttcatcgaacttcgtgaatcatttagcggcgattagcgagagcattgcgcactcggatgggtttgatttccctaccctgtgtgcatgtgaaagaaatgcatgatgctgacgttctcactgccggtcttgaagagaaaaggctactgccaat

SEQ ID NO: 139 - DNA, 549 bp, Ctenocephalides felis
gccagtgccgccatgtctgagagcttgaagcaactgccagtaatctgggttttaggtggacctggatcgggcaaaggaacccaatgtgacaaaattgttgctaaatatggattcacccacttgtctactggtgatttgctccgagctgaggttcaaagtgggtcagatagaggcaagaacctcacggctatcatggagagaggagaactagtacccatggacatagtacttgacttattaaaagaagctatgactaaggccttgcccacatctaaaggatttttaattgatggatatccccgtgaaaaagaccaaggtgtggctttcgaaaatcaagtgactcccgtaaacacaattttatatttcgaatgtaagcctgaaacattggtcgaacgtcttttgggacgtgcaaaaacttctggccgagctgatgacaatgaagagaccatcaaattgcgtttgatcttcatgccaataatgaccaagttttggcctatcccagacagactgaagagataacgcgaaaggcagtgataatctttgcggaga

SEQ ID NO: 140 - DNA, 500 bp, Ctenocephalides felis
  misc_feature (73)..(73): n = unknown
  misc_feature (83)..(84): n = unknown
  misc_feature (86)..(86): n = unknown
  misc_feature (93)..(93): n = unknown
  misc_feature (96)..(96): n = unknown
  misc_feature (103)..(103): n = unknown
  misc_feature (114)..(115): n = unknown
  misc_feature (123)..(125): n = unknown
  misc_feature (130)..(130): n = unknown
  misc_feature (132)..(134): n = unknown
  misc_feature (136)..(136): n = unknown
  misc_feature (143)..(143): n = unknown
  misc_feature (150)..(150): n = unknown
  misc_feature (155)..(155): n = unknown
  misc_feature (157)..(158): n = unknown
  misc_feature (164)..(165): n = unknown
  misc_feature (167)..(167): n = unknown
  misc_feature (173)..(173): n = unknown
  misc_feature (183)..(183): n = unknown
  misc_feature (186)..(186): n = unknown
  misc_feature (188)..(188): n = unknown
  misc_feature (191)..(192): n = unknown
  misc_feature (198)..(198): n = unknown
  misc_feature (207)..(207): n = unknown
  misc_feature (216)..(220): n = unknown
  misc_feature (224)..(224): n = unknown
  misc_feature (235)..(235): n = unknown
  misc_feature (237)..(237): n = unknown
  misc_feature (239)..(239): n = unknown
  misc_feature (241)..(241): n = unknown
  misc_feature (243)..(244): n = unknown
  misc_feature (248)..(248): n = unknown
  misc_feature (251)..(251): n = unknown
  misc_feature (253)..(253): n = unknown
  misc_feature (258)..(259): n = unknown
  misc_feature (273)..(273): n = unknown
  misc_feature (276)..(276): n = unknown
  misc_feature (280)..(281): n = unknown
  misc_feature (284)..(284): n = unknown
  misc_feature (290)..(290): n = unknown
  misc_feature (296)..(296): n = unknown
  misc_feature (302)..(302): n = unknown
  misc_feature (304)..(304): n = unknown
  misc_feature (308)..(308): n = unknown
  misc_feature (315)..(316): n = unknown
  misc_feature (319)..(320): n = unknown
  misc_feature (326)..(326): n = unknown
  misc_feature (332)..(332): n = unknown
  misc_feature (334)..(334): n = unknown
  misc_feature (337)..(337): n = unknown
  misc_feature (340)..(341): n = unknown
  misc_feature (345)..(346): n = unknown
  misc_feature (348)..(350): n = unknown
  misc_feature (353)..(354): n = unknown
  misc_feature (359)..(361): n = unknown
  misc_feature (367)..(368): n = unknown
  misc_feature (374)..(374): n = unknown
  misc_feature (376)..(376): n = unknown
  misc_feature (389)..(389): n = unknown
  misc_feature (391)..(395): n = unknown
  misc_feature (397)..(397): n = unknown
  misc_feature (412)..(412): n = unknown
  misc_feature (415)..(415): n = unknown
  misc_feature (420)..(421): n = unknown
  misc_feature (425)..(426): n = unknown
  misc_feature (430)..(431): n = unknown
  misc_feature (436)..(436): n = unknown
  misc_feature (438)..(438): n = unknown
  misc_feature (442)..(442): n = unknown
  misc_feature (444)..(444): n = unknown
  misc_feature (448)..(451): n = unknown
  misc_feature (453)..(453): n = unknown
  misc_feature (455)..(455): n = unknown
  misc_feature (458)..(458): n = unknown
  misc_feature (461)..(461): n = unknown
  misc_feature (463)..(463): n = unknown
  misc_feature (468)..(468): n = unknown
  misc_feature (481)..(481): n = unknown
  misc_feature (483)..(484): n = unknown
  misc_feature (490)..(490): n = unknown
  misc_feature (497)..(497): n = unknown
gttttatatataaatataggattaattttaaggaatattattaaatttatttatattaatatattttactccncggccgcgannangctagcngtntccctgntcattggcggnngccccccnnnctctncnnncncccctcnctccccncctcncnncccccnncntctacntctctccccnccncnccnncctttntctcccccncccctcccnnnnnctcntctctcttccngncncncnncccntcncncctcnnccctcttccctccntcncccnnccnttcccnccctcncccctntncccncgccccnnccnnctcccntccctntnctnccnngtcnncnnnccnnctccnnncctccnncccccncntctcctcccctcncnnnnncncccctccccccttcnccnctccnntcgnnctcnnctctntncccntncccnnnncncnccnctntncctcngcctcccctttcntnnctcccncctcccnctc

SEQ ID NO: 141 - DNA, 500 bp, Ctenocephalides felis
  misc_feature (484)..(484): n = unknown
acaagtttgattacaatgtaatttctaagcatttgataaaagtttatattgctagttttttaattataattacaaataacaacataaatatataacacatatgttttatatgttaacaacattaaactttataaataagtattaatatataagccattaatatttgctttagggtaaaaacttaatacaactccataaaatataaggccttgattattcacaattatctgatttaaggcattaaggtaattgttgaagtttatgaattataaaactttttactttataatcataatataagttaattgactgaataaataatttgtttgtataggtaactatgaccagccacccgttaacttatggaacatttcttgattcaactgttgatttgcatctttagatctcattgacataaatatgtaacctccgataaactcatggatcaccttgcaatctgctgataagcatgaaaatattatgntttcttcttcgaatga

SEQ ID NO: 142 - DNA, 285 bp, Ctenocephalides felis
  misc_feature (6)..(6): n = unknown
  misc_feature (37)..(37): n = unknown
  misc_feature (51)..(51): n = unknown
  misc_feature (76)..(76): n = unknown
acctgngtatttaattcttcttattataacatgtttnagtatcatatattnaatatacctgaattacggatatatnactataaacaatttctaaacataaaatcatatttacacaaatattttttatctattatttcaatttagcaaaaacttctcccaacatttgattacataaagcagcataaggattcatttccaccaactgattttttgcaaaggtggagcctaagcttgcggctttgttgaaatcttcccgagctaaatcgtcttcaccagtttttctgt

SEQ ID NO: 143 - DNA, 198 bp, Ctenocephalides felis
accacaggcattgacacaagggttaacacaactattgtcgatacaagcttggtcttgtctgcattcttcacttcctatgcattcgtatcgaaaacactgcctcaaaggatctcctttatgatttggcaggcatgaacaaacaggtaacccctcatggcttctagtgcattgcgcatttacaccacaggtgtgataggt

SEQ ID NO: 144 - DNA, 500 bp, Ctenocephalides felis
  misc_feature (49)..(49): n = unknown
  misc_feature (62)..(62): n = unknown
  misc_feature (109)..(109): n = unknown
  misc_feature (140)..(140): n = unknown
  misc_feature (181)..(181): n = unknown
  misc_feature (222)..(222): n = unknown
  misc_feature (268)..(268): n = unknown
  misc_feature (277)..(277): n = unknown
  misc_feature (285)..(285): n = unknown
  misc_feature (455)..(455): n = unknown
ataaaataattttaaaaaaaatatttttaaatttattagttatgtaatntaaaatgaaatantaataataataatagtagattagtattgtaaaagaaaaattaaaatngtgtataagtaaatttaatttattgtatctngtgtatcagagttaatttaataaaagatatgaagaatattnttctcgaatttaaaaggggaatttattatttaatttaatgnaatataattatttaaaataataaattagtaatgaaatgttattcgnttttaaagntatctagnttttttagaaataaatttaatttattatatttaaatatttatattaatttattaaatatagatattttaaatataaaatatttttagggataagcttaaaaataaattattataaattaataaattatttataaatttataggggtataaatattcattaatataaaaangtataatttatttataaataaattaaaattagtagattttaaatt

SEQ ID NO: 145 - DNA, 474 bp, Ctenocephalides felis
  misc_feature (25)..(25): n = unknown
acaaaaacgcaggaaaccccacggntgcatttctataaaataatatcatagatttgaaaactatccgaatccaaaagttttaacgcctaatatttatatcaaaactttcccaacattatccctagattctcttaataaaactttcatttcattattagaaccactcgaactcaagtttaataaaaccatttcaacatttattaataatttcaaaaactttatatatcaccattatccccagcagaagtatcggagcagtcataaaattcttcatcagaatcttccggactttcggacttattttcaggatttgttgaagcagcattgtcccgttcttgctgccgagcaacgcagcaattcagcaattgtaattgttggtgaagaatacacgtgcgaggatcgggaaatccgcctccaactcccggtattttgtggtattatcaatcctgtatctcaattcttccacaaattcgt

SEQ ID NO: 146 - DNA, 500 bp, Ctenocephalides felis
  misc_feature (19)..(19): n = unknown
  misc_feature (63)..(63): n = unknown
  misc_feature (66)..(66): n = unknown
  misc_feature (70)..(70): n = unknown
  misc_feature (160)..(160): n = unknown
  misc_feature (461)..(461): n = unknown
  misc_feature (468)..(468): n = unknown
ttaaaactaactcattcgngtaatgttaacatttaaaccattatacattgcaacaagatcctnggnggtnggctccaaagcattttcacaatacgcttcttattttattgatcctgttttcaaaccacaaaaacaaaatgaattagctcaagaaggtganatccaaaacttgcacacgtgcctattaaagctgctcgaaataatgatactagctctgtattccatgatgatctacttagcaaattcacaaattatgttatgaaaggcggacaaaaggttttggctagaaatttaatagatgaagcttttgtgaatattaaaagaatacaaattgaaaaatatcacaaggctaaagaggaaaataagagtaatattatactaaatccaaaagtgatattgcacaatgctattacaaattgcaggccaggtctaacacttacaccaatcaaaagaggaggtgntcgtatnagttcctatcccgacactgagaagcactcata

SEQ ID NO: 147 - DNA, 347 bp, Ctenocephalides felis
caattatgttatttcacctttaaaacttgtattatagcataatagacagaattatacttcatctattcatcgtttccgcaaataaaccaattcgaaaattacaatatattttgcataataaaattacataggaaaaataaaacatctattctaattaacttactccaatttttgaggctattttatcagcacatatttcagcaatatctcgacctagcacgccataatataacccataaaatagtaacaaaaaacctaagtccatccaagaatgcggcctttgattgaagattaaattgactccagcaaatgttgccatcaccattccataaccaattataccaagt

SEQ ID NO: 148 - DNA, 500 bp, Ctenocephalides felis
atttttaggctttaaataacccaatagattgtaaaagatgtaaaataaaaacactatctctgatgcttccacacaaatacctatttagtaaaataaaactaaatgaaatttattagtattttccaaactcatagctcaggcaatattataattaatttggtagaggcagtcttaataatagcatgcaaaaacaaaaataaatattttgtaaaaaaactattaaagtgaagaaactgatcaatacagttaaactataaaaaaaaggtaacaccttataactaacagccgaacaaaataagaaagaagcacttcattaaacacttacaggtatctggttaaatcctctatatcaaccagcatgctatcttggctcatatgaagttcatcacgattcattaataagcccaccaactgttcattaaatatttcaacctgtgtatggagtcggcaaacaacaacctgcaattgagcaatcgtcatgctggtcaacaaacgccggg

SEQ ID NO: 149 - DNA, 500 bp, Ctenocephalides felis
  misc_feature (34)..(34): n = unknown
acttacaactgcctaaatggtccggtatgtcttntatgttcggtaaagggtatgaatcacccaggggcgtaacgtgccttggcggggccccatatcaaaatcggtttgggggctcccctaaagatttttcataatttaaagaaacataaagagattaataaattcatttaataaaattaaaagaagatttatttatcaaattttcaaatatacatcgaatattatttttaatattttacaagtaactaaaattaaatattcactctccttgcctttttatcagcaaactgatttattaagtcatttatagctgatgttgtttttagtttttctaatgtttttgcctctatggacaatagagacaggtctgatagacgttcctgttttattgatgttctgagataattttggattaattttaattttgaaaaactcgtttcagcagttgcggttgtaactggaagggcaagaataaaatgcaagctgttattacatccgga

SEQ ID NO: 150 - DNA, 550 bp, Ctenocephalides felis
  misc_feature (542)..(542): n = unknown
gctaaaccacgtgtttattaatgtataaattattattaaacaagttttccggaaatatattgtagatcaaactaaacaggaataaaattgaataatacacaatgggaaaactgaacgtatcaatattacgttatttagacaaagaagactttcgcgttttgacggccattgagatgggcatgaaaaatcatgaactggtgccgggatctcttacagctctgatcgcaaatttgcgacatggtggtgttcacaaaattttaagagaactttgcaaacatcggttgctgagctacgaacgtggaaaacattatgatggatacaggctgacaaatatgggctatgattatctggccttgaaagcattaactatgagaaacgttgttgagtcatttggaaatcaaattggtgttggtaaggaatcgaatatttatgttgtagcagatgaagaaggtgaagccttatgtcttaaactcccagattggccgaacatgctttcgagtgtaagcaaatagagatatcatcacatagcatagagctctggnttattatc

SEQ ID NO: 151 - DNA, 549 bp, Ctenocephalides felis
ggaacgtgcaacatatttagttatttaaataatttgataatttaacaaaaatggcaaccattgttcgcaaaatcatcagcaccaaagctgcagccaagccagtggccccatataatcaggcaattttggtcgatcgcactctctacgtatcgggatgtctaggattggacgcctgcacaatgaaattggtcgcaggaggagctgccgccgaagcaagacaagctttgaccaaccttggacatatcttggccgctggtgactcatcatatgaccgtgttgtgaaaaccaccgtcttacttgccgatttagctgaccttgcagctgtaaatgaagtttatggacaagtgtttacacatgaccaccctgccagatcctccttcaagttggagcactaccaatgaatgctaaggtcgaaattgaagtcgttgcagtttcaggagacgtccgaactattccggagtggaatgctaagaaagtaagaataatatcataattaatagtgttcagtaaattatagtttatatgtaaataattaactaccatagtttt

SEQ ID NO: 152 - DNA, 549 bp, Ctenocephalides felis
  misc_feature (484)..(484): n = unknown
  misc_feature (493)..(493): n = unknown
  misc_feature (542)..(542): n = unknown
  misc_feature (546)..(546): n = unknown
acgaaagatttcgatggggcggagcgggcgagatggaggacagctacgaagcggctttacgacgaggactgccctatcccgtccttacggtcgctgaatacttctcgctgggacaagaaggattcgcttggggaggacaatatagagctgcgggatattatgcttcgattttacttggtacggcattggcgtgttggctgcttatgaacctgctcctggtagctgtcccgcgatatggagcctatttgatgtttacgactgggcttttattggctgccacggatttaggctactatctgatgttgccagcaaggcctctacgaattgtacttgaaggcggagcgctcgattttcgattaggatggtgcttctggctggtcttagttgctggaagtatatgctcattttccggattagtaataacgtgcgtggatttggcatttctcaccgattttcgactgtcttgaggtgactatgatctccntacgatcgnacgttatattgaagagacccgacacgcctcaggaaacgcacagtggcgnaacngcg

SEQ ID NO: 153 - DNA, 633 bp, Ctenocephalides felis
  CDS (67)..(507)
agtaaatactacatttgaaaattataaacaaattgttttataaatttgaagtagaagaaaatcaaaatgaagatattcttggtgattggaacactggtcgctttatattctgcggcagaggctgctaaatatactaaagaagaagcaaaagaaaaacttttgcagattggtaaggattgtgctgtagaaacaggagcttcttcagatgatattgaaaaattactgcaaaagaacataccagattcaaagcctggaaaatgcatgattaattgcgtttacaagaaacttggagtgatgaaagatggaaaataccatcctgatgccggaattgaagtatcagccatggtacacgaacacgattcagaattaatggaaaaagttaagaaaatcgcaaccgaatgtgacagcgaagccaaaggagaagacgagtgcgaaattgctgccaaagcaatggagtgcggcgtgaggatggccaaagaacacaacctaatggacgcgataccaatataatagttaaaaatttaatattaggtcggttgaagacctgtcaaaatgtagtcgttaaattgtagtgtgaagttgtcacgatgtgggcgtaggaataaaatgctatttaaaaaaaaaaaaaaaaaa

SEQ ID NO: 154 - protein, 147 aa, Ctenocephalides felis
MKIFLVIGTLVALYSAAEAAKYTKEEAKEKLLQIGKDCAVETGASSDDIEKLLQKNIPDSKPGKCMINCVYKKLGVMKDGKYHPDAGIEVSAMVHEHDSELMEKVKKIATECDSEAKGEDECEIAAKAMECGVRMAKEHNLMDAIPI

SEQ ID NO: 155 - DNA, 633 bp, Ctenocephalides felis
ttttttttttttttttttaaatagcattttattcctacgcccacatcgtgacaacttcacactacaatttaacgactacattttgacaggtcttcaaccgacctaatattaaatttttaactattatattggtatcgcgtccattaggttgtgttctttggccatcctcacgccgcactccattgctttggcagcaatttcgcactcgtcttctcctttggcttcgctgtcacattcggttgcgattttcttaactttttccattaattctgaatcgtgttcgtgtaccatggctgatacttcaattccggcatcaggatggtattttccatctttcatcactccaagtttcttgtaaacgcaattaatcatgcattttccaggctttgaatctggtatgttcttttgcagtaatttttcaatatcatctgaagaagctcctgtttctacagcacaatccttaccaatctgcaaaagtttttcttttgcttcttctttagtatatttagcagcctctgccgcagaatataaagcgaccagtgttccaatcaccaagaatatcttcattttgattttcttctacttcaaatttataaaacaatttgtttataattttcaaatgtagtatttact

SEQ ID NO: 156 - DNA, 441 bp, Ctenocephalides felis
  CDS (1)..(441)
atgaagatattcttggtgattggaacactggtcgctttatattctgcggcagaggctgctaaatatactaaagaagaagcaaaagaaaaacttttgcagattggtaaggattgtgctgtagaaacaggagcttcttcagatgatattgaaaaattactgcaaaagaacataccagattcaaagcctggaaaatgcatgattaattgcgtttacaagaaacttggagtgatgaaagatggaaaataccatcctgatgccggaattgaagtatcagccatggtacacgaacacgattcagaattaatggaaaaagttaagaaaatcgcaaccgaatgtgacagcgaagccaaaggagaagacgagtgcgaaattgctgccaaagcaatggagtgcggcgtgaggatggccaaagaacacaacctaatggacgcgataccaata

SEQ ID NO: 157 - protein, 147 aa, Ctenocephalides felis; identical to SEQ ID NO: 154

SEQ ID NO: 158 - DNA, 441 bp, Ctenocephalides felis
tattggtatcgcgtccattaggttgtgttctttggccatcctcacgccgcactccattgctttggcagcaatttcgcactcgtcttctcctttggcttcgctgtcacattcggttgcgattttcttaactttttccattaattctgaatcgtgttcgtgtaccatggctgatacttcaattccggcatcaggatggtattttccatctttcatcactccaagtttcttgtaaacgcaattaatcatgcattttccaggctttgaatctggtatgttcttttgcagtaatttttcaatatcatctgaagaagctcctgtttctacagcacaatccttaccaatctgcaaaagtttttcttttgcttcttctttagtatatttagcagcctctgccgcagaatataaagcgaccagtgttccaatcaccaagaatatcttcat

SEQ ID NO: 159 - DNA, 384 bp, Ctenocephalides felis
  CDS (1)..(384)
gctaaatatactaaagaagaagcaaaagaaaaacttttgcagattggtaaggattgtgctgtagaaacaggagcttcttcagatgatattgaaaaattactgcaaaagaacataccagattcaaagcctggaaaatgcatgattaattgcgtttacaagaaacttggagtgatgaaagatggaaaataccatcctgatgccggaattgaagtatcagccatggtacacgaacacgattcagaattaatggaaaaagttaagaaaatcgcaaccgaatgtgacagcgaagccaaaggagaagacgagtgcgaaattgctgccaaagcaatggagtgcggcgtgaggatggccaaagaacacaacctaatggacgcgataccaata

SEQ ID NO: 160 - protein, 128 aa, Ctenocephalides felis
AKYTKEEAKEKLLQIGKDCAVETGASSDDIEKLLQKNIPDSKPGKCMINCVYKKLGVMKDGKYHPDAGIEVSAMVHEHDSELMEKVKKIATECDSEAKGEDECEIAAKAMECGVRMAKEHNLMDAIPI

SEQ ID NO: 161 - DNA, 384 bp, Ctenocephalides felis
tattggtatcgcgtccattaggttgtgttctttggccatcctcacgccgcactccattgctttggcagcaatttcgcactcgtcttctcctttggcttcgctgtcacattcggttgcgattttcttaactttttccattaattctgaatcgtgttcgtgtaccatggctgatacttcaattccggcatcaggatggtattttccatctttcatcactccaagtttcttgtaaacgcaattaatcatgcattttccaggctttgaatctggtatgttcttttgcagtaatttttcaatatcatctgaagaagctcctgtttctacagcacaatccttaccaatctgcaaaagtttttcttttgcttcttctttagtatatttagc

SEQ ID NO: 162 - DNA, 631 bp, Ctenocephalides felis
  CDS (65)..(505)
gtaaatactatattggaaaattataaaaaagtttatttataaatttaaagtagaagaaatcaaaatgaagatattcttggtgattggagcactggttgctttatattctgtggcagaggctgcaaaatataccaaagaagaagcaaaggaaaaacttttgcagataggcaaagattgtgctgtagaaacaggagcatcttcagatgatatcgaaaaattattgcagaagaacataccagattcaaaagcaggaaaatgcatgatcaattgcgtttacaagaaacttggagtgatgaaagatggaaaataccatcctgatgccggaattgaagtatcagccatggtacacgaacacgattcagaattaatggaaaaagttaagaaaatcgcaaccgaatgtgacagcgaggccaaaggagaagacgagtgcgaaattgctgccaaagcaatggcgtgcggcgtgaggatggccaaagaacacaacttaatggacgcgataccaatataatagtaaaaaaatctttgttaggtcggttgaagacctgtcaaaatgtagtcgttaaattgtagtgtgaagttgtcacgatgtgggcgtaggaataaaatgttatttaaaaaaaaaaaaaaaaaa

SEQ ID NO: 163 - protein, 147 aa, Ctenocephalides felis
MKIFLVIGALVALYSVAEAAKYTKEEAKEKLLQIGKDCAVETGASSDDIEKLLQKNIPDSKAGKCMINCVYKKLGVMKDGKYHPDAGIEVSAMVHEHDSELMEKVKKIATECDSEAKGEDECEIAAKAMACGVRMAKEHNLMDAIPI

SEQ ID NO: 164 - DNA, 631 bp, Ctenocephalides felis
ttttttttttttttttttaaataacattttattcctacgcccacatcgtgacaacttcacactacaatttaacgactacattttgacaggtcttcaaccgacctaacaaagatttttttactattatattggtatcgcgtccattaagttgtgttctttggccatcctcacgccgcacgccattgctttggcagcaatttcgcactcgtcttctcctttggcctcgctgtcacattcggttgcgattttcttaactttttccattaattctgaatcgtgttcgtgtaccatggctgatacttcaattccggcatcaggatggtattttccatctttcatcactccaagtttcttgtaaacgcaattgatcatgcattttcctgcttttgaatctggtatgttcttctgcaataatttttcgatatcatctgaagatgctcctgtttctacagcacaatctttgcctatctgcaaaagtttttcctttgcttcttctttggtatattttgcagcctctgccacagaatataaagcaaccagtgctccaatcaccaagaatatcttcattttgatttcttctactttaaatttataaataaacttttttataattttccaatatagtatttac

SEQ ID NO: 165 - DNA, 441 bp, Ctenocephalides felis
  CDS (1)..(441)
atgaagatattcttggtgattggagcactggttgctttatattctgtggcagaggctgcaaaatataccaaagaagaagcaaaggaaaaacttttgcagataggcaaagattgtgctgtagaaacaggagcatcttcagatgatatcgaaaaattattgcagaagaacataccagattcaaaagcaggaaaatgcatgatcaattgcgtttacaagaaacttggagtgatgaaagatggaaaataccatcctgatgccggaattgaagtatcagccatggtacacgaacacgattcagaattaatggaaaaagttaagaaaatcgcaaccgaatgtgacagcgaggccaaaggagaagacgagtgcgaaattgctgccaaagcaatggcgtgcggcgtgaggatggccaaagaacacaacttaatggacgcgataccaata

SEQ ID NO: 166 - protein, 147 aa, Ctenocephalides felis; identical to SEQ ID NO: 163

SEQ ID NO: 167 - DNA, 441 bp, Ctenocephalides felis
tattggtatcgcgtccattaagttgtgttctttggccatcctcacgccgcacgccattgctttggcagcaatttcgcactcgtcttctcctttggcctcgctgtcacattcggttgcgattttcttaactttttccattaattctgaatcgtgttcgtgtaccatggctgatacttcaattccggcatcaggatggtattttccatctttcatcactccaagtttcttgtaaacgcaattgatcatgcattttcctgcttttgaatctggtatgttcttctgcaataatttttcgatatcatctgaagatgctcctgtttctacagcacaatctttgcctatctgcaaaagtttttcctttgcttcttctttggtatattttgcagcctctgccacagaatataaagcaaccagtgctccaatcaccaagaatatcttcat

SEQ ID NO: 168 - DNA, 384 bp, Ctenocephalides felis
  CDS (1)..(384)
gcaaaatataccaaagaagaagcaaaggaaaaacttttgcagataggcaaagattgtgctgtagaaacaggagcatcttcagatgatatcgaaaaattattgcagaagaacataccagattcaaaagcaggaaaatgcatgatcaattgcgtttacaagaaacttggagtgatgaaagatggaaaataccatcctgatgccggaattgaagtatcagccatggtacacgaacacgattcagaattaatggaaaaagttaagaaaatcgcaaccgaatgtgacagcgaggccaaaggagaagacgagtgcgaaattgctgccaaagcaatggcgtgcggcgtgaggatggccaaagaacacaacttaatggacgcgataccaata

SEQ ID NO: 169 - protein, 128 aa, Ctenocephalides felis
AKYTKEEAKEKLLQIGKDCAVETGASSDDIEKLLQKNIPDSKAGKCMINCVYKKLGVMKDGKYHPDAGIEVSAMVHEHDSELMEKVKKIATECDSEAKGEDECEIAAKAMACGVRMAKEHNLMDAIPI

SEQ ID NO: 170 - DNA, 384 bp, Ctenocephalides felis
tattggtatcgcgtccattaagttgtgttctttggccatcctcacgccgcacgccattgctttggcagcaatttcgcactcgtcttctcctttggcctcgctgtcacattcggttgcgattttcttaactttttccattaattctgaatcgtgttcgtgtaccatggctgatacttcaattccggcatcaggatggtattttccatctttcatcactccaagtttcttgtaaacgcaattgatcatgcattttcctgcttttgaatctggtatgttcttctgcaataatttttcgatatcatctgaagatgctcctgtttctacagcacaatctttgcctatctgcaaaagtttttcctttgcttcttctttggtatattttgc

SEQ ID NO: 171 - DNA, 133 bp, Ctenocephalides felis
  misc_feature (6)..(6): n = unknown
ctgtangtgaagaattattaggcagagtagttgatgctttaggaaatgccattgatggcaaaggtgctttacaaagcaaaaccagattccgtgtaggaactaaagctcccggtatcattccacgtgtctctgt

SEQ ID NO: 172 - DNA, 498 bp, Ctenocephalides felis
  misc_feature (439)..(439): n = unknown
gctgtaaattgggcggctcttgccgagcgtgttccacctgcccaaaaacccaatttaatggccttcaaagtaaaaagtgacggatatatgaggagggttgcggcgaatccggaaaatccaccagctttagattggaacttttataagaagtttgtgagtgtgcctggaatggtagccgaatttcaaaaacaatgcgagtctctgaaagtcccatatccagccgataattacacttctaaagtcgatgaacaagaacggcaagtcaaggctgaaatagaaaccttcaaaaaggagtctaatgatcgtattacaaaatatcaagctgatatggaaaggcttaaggctttgttgccatatgaaagcatgacgttggaagacttccatgatgcacatcctgacttggctttggatgctgttaacaaaccaacgttctggcctnacacttcagaggaacaattgggataccaatccaaagatccagtagaagctccttctcat

SEQ ID NO: 173 - DNA, 557 bp, Ctenocephalides felis
  misc_feature (472)..(472): n = unknown
tccaaaaatattcttatggtagccaatgaggttggacgtaaaccaccaactttccaagatgcagctaaattaacaaatgctgtattgaattcaggttatgatttcgcatccggaaaaataatttacaataaatttaaatctgttgtctcctacagttctgctgaattaccattgtttagcctgggagctgttgagtctgccccaaaattgggtgtatacgattccttagatgctgatgtcatccaaagctacttggaattttcaatggcttcattattattctacacaatgaaggaaggagcttgctcggagcagtcatcccgtatgactgctatggacaatgctagcaagaatgcaggagaaatgattgacaaattgacattaacattcaacagaactagacaggctgtcatcaccagagaacttattgaaattatttctggagctgcttctttggattaaatttcatacnaatattttaatatgtggcttcatctaagtagctcaatttattacaatatctttaatactttggttatttttaatttgaatcttgg

SEQ ID NO: 174 - DNA, 498 bp, Ctenocephalides felis
aatcaattatttattgactatataaataatatacagatgttagttaaaattgcatacaacatgaacatttcattttcttctatttttgacaaagtttattttaaacaggtgttgaaataatttcagtgtacagctttactttactggcaacactcatatcaacataacgatctccaattgatacgaccattccacccaagattgagggattaactttaagggttagtaataagttttctttgggttttaagaatcctcttaaagtgctttcaagttgtttttgttgattctcatctaaaggtttagctgttgtaacttcacatggaacctctccacgatgagcagacatcataactttataagcgttgataacaccttccagtttatttaaacgtccattctcagcaagtaactccagcaagttggatgtagctggagccatttgcagcttgctgctggcttccttcaatgcatttgatttaatggagcgcttgaaag

SEQ ID NO: 175 - DNA, 236 bp, Ctenocephalides felis
  misc_feature (31)..(31): n = unknown
  misc_feature (45)..(45): n = unknown
  misc_feature (54)..(55): n = unknown
  misc_feature (97)..(97): n = unknown
  misc_feature (101)..(101): n = unknown
  misc_feature (210)..(210): n = unknown
ttttttttttttttttttttttttttttggnaaatttctctagangaaagaggnnttaaaacagcaaatacataagattgaataatagatacagcantttntaaaattaataaaattaattgagagaaaattaaaattcaaattaatcatatagatagggagtttcctgtattgccaagtaaagttagaattaaatgtccagcaattatntttgctgagagtcggatggctaaagt

SEQ ID NO: 176 - DNA, 161 bp, Ctenocephalides felis
  misc_feature (33)..(33): n = unknown
atcttgtccttcctggtcacggaagtattcagntacagttaatccagtcaaagcgacacgggcacgggcgcctgggggttcgttcatctgtccgtagacaagagctaccttggaggtcttgtctttcaaggaaatgacaccaccttcaatcatttcattgt

SEQ ID NO: 177 - DNA, 549 bp, Ctenocephalides felis
  misc_feature (5)..(5): n = unknown
gacangttatgttatttatttcatctgattttatcacataaaaacaaaaataagtagcatggatttcatacttttaattataaaatgcagtacagtttaaaatttgtcaaaaagacagtgttacttatttaataatacatgaaattatgcaacttacattttcattttggataacgtatttctaatccaatactcacttattttattaaattatgcattaaaagtagctaaaaagtcagctacaattttctttaattgggcatcagatgcttcactaatcgttccttccttggcaatggtttgcaaaagggatgaatggttggctttgatgtgagcgttaaattccttttcaaatgctgtgatcttggttgggtccattttgtccaagtgtcctcggacaccacagtagataattgcaacttgttcttcaatagccattgggacatattgccttgcttcaataattcagtcaaacgaacacctctgttaacaattgtgtgtggtgatcaagactgaccgaattggcaaaagcagcacctacgatttgac

SEQ ID NO: 178 - DNA, 400 bp, Ctenocephalides felis
  misc_feature (4)..(4): n = unknown
gatncttgaaagtccgaaaattattaatatcattaattaaaatggaccagggaaaagcaccagttcgcgtttcacctctgatcaaattcggaaggtggagttttctcgttgtcggaatattatatggagcagctcaccaaagcaggctggcaaaacgcgaagtaggaattagagaagtcgaagctaaacataaagcaattcgggatgcaaaattagctgaggaaaagaaacgagctcaagaagaggaaaacaaatacttcgcttcactttaaacagattagcattattaaataggaaatgcagtaacattcaccataaggcattagatgtgctctgtaaattattcggattttatgtgaaataaaaagttattatacatacaaaaaaaaaaaaaaaaaaa

SEQ ID NO: 179 - DNA, 549 bp, Ctenocephalides felis
  misc_feature (536)..(536): n = unknown
atcagccactgcttctgatgctgcccctcttcaatatcttgctccatactctggatgtgctatgggtgaattcttccgtgacaatggaaaacatgctttgatcatctatgatgatttatccaaacaagctgttgcttatcgtcaaatgtctctattgttacgtcgtccaccaggtcgtgaggcttatccaggtgatgtcttctaccttcactcacgtctacttgaacgtgccgctaaaatgtctgaagctcatggaggtggctctttgactgctttgccagttattgaaacacaagctggtgacgtatcagcttatattccaactaatgtcatttccattactgatggtcaaatcttcttggaaactgaattgttctacaagggtattcgaccagccatcaatgtaggtttatctgtatctcgtgtaggttctgctgcacaaaccaaagccatgaaacaggttgccggtccatgaaactggaatagctcatatcgtgaggtggctgttttgccaattcggctagatcttgatgcancaccaacaatggt

SEQ ID NO: 180 - DNA, 550 bp, Ctenocephalides felis
  misc_feature (509)..(509): n = unknown
  misc_feature (549)..(549): n = unknown
gttaatataggattcgttgtttctagaaccacaacaaattaaaacacaccaagatgttctcagcagcaaaattcatcgccccagtcgccaaatccgcatttgtcaatggatcaaaggcatatctgcgaccaatctcaagtgcagtattgactcaaagctctactatcaatgtattacctgcagccgctcaatctagcattttaccacaagttcgttgtctgcaaactacagcagtaacgaaagacattgattcagcagctaaatttattggtgctggagcagccaccgtaggagtagcaggatcaggagctggtattggttcagtctttggatcattaatcattggttatgcacgtaatccatcccttaaacaacaactattctcatatgccattcttggatttgcattgtcagaagctatgggacttttctgcttatgatggctttcttactgtattcgcattctaatttggttttcatttgcccgaagagggtctagaagagtgctnacgtatcaccaggactgtattaatcattcaaatccattant

SEQ ID NO: 181 - DNA, 498 bp, Ctenocephalides felis
  misc_feature (443)..(443): n = unknown
  misc_feature (495)..(495): n = unknown
caagttatctctgaattccttcacggctcctcttgcgcatttgccgacttcacgaaccaagttgcccaattgggaccaggtttctttgaaagccttggccaagtccttggctccttcacgggcagcttgaaggacatctttcaagcaagctctggcttcatcgacatcggctgcggtaacaacgcactccttggcttgtgctctgagggcttcggcgttctccctggcttctctccaggcggccaagccattttggcgaacttggttgaattcctcacgtttatcatccctgcaagccttgaccttagcacgagcttcttgtgcaaaacctagagctttttggtgttggcctttaaggcattcctttgcggcttcactcacttttttgctaagtttcctttcaacttctttgttgaacctttccaaatctctatcgacttcangggcaaatccttgtttttcgaattcagcagcaatcatttaattttgctatcntgg

SEQ ID NO: 182 - DNA, 498 bp, Ctenocephalides felis
  misc_feature (219)..(291): n = unknown
  misc_feature (403)..(403): n = unknown
  misc_feature (415)..(415): n = unknown
  misc_feature (480)..(480): n = unknown
ggaagcaccttaggctgtgcaggacatgtaactgtatagcattttgtgcccagagccataggtccgcaattatgacgtaacggatcatatgcaaaatttgcggggcaataatattgggttcctatactattttcgtcacaataataatagctttgacaatcatttatatttggataaaatctcgatggtgacggacatttgaaaccttgtactttgcanactgtactttctttagtggtgcactgtagatatccactttgatcagcgcacacttgatctgggctacaggattccttaaccggatctgctcctatttccggacaatactgcatttcgggtgaactgcacgaattcacgcaactaaattttacttttttacatttttgctcgggtttcggtacangtgtacgttcangagtagtactactcctggtgcgggctcatccaatgatgcaaatacttctttatttactgttaaangcgttccgtcgacattaa

SEQ ID NO: 183 - DNA, 424 bp, Ctenocephalides felis
  misc_feature (364)..(364): n = unknown
  misc_feature (415)..(415): n = unknown
  misc_feature (417)..(417): n = unknown
  misc_feature (423)..(423): n = unknown
ccagcatttgatggagtaaagaatgtatatgcttcttcaccccttcctaaagtgggtgttaatgtccttcaaggagaggtttctattataaaccctgataatgaactggaaaaaaaatataaagtaactattaaatttgcttcttatgttgacatgacttccctttcaaaatatatggaaaatggatcatctattgagacaccgcaggaagccctgcaatgtattgacatcatatttaggcatgcactctccaaacaatttgttcaggtgggaaagtccttctttacaccacccagtggtcgaattgtttctcttggtgatggaatggatctatggtatgggttattttctagttgtgttttangatggaaaaatgtagatgttgcacataaaaggatttcaactaaacaactantncagaant

SEQ ID NO: 184 - DNA, 313 bp, Ctenocephalides felis
aattcttggctataagttcgttgcatgttttgcaagtgatttgtttattgcatttattcccgtggcatattttacatgaatcagagtttgcattacaatcgttaccctgatctgatttgcatcctcgagtaatgacacctttttcaatttttgaatagcagtcgtcctttggattcatacaaactttggtcttcgtctttcctgcatctttgaaacattcgtttcttagttctggaagtttttgaacgttacaacccgatttctcgcaacacattttttctcggttagtcgagtcacaactttctttaaccgt

SEQ ID NO: 185 - DNA, 498 bp, Ctenocephalides felis
  misc_feature (226)..(226): n = unknown
  misc_feature (348)..(348): n = unknown
  misc_feature (450)..(450): n = unknown
  misc_feature (492)..(492): n = unknown
tatttgatctaaaagcagataaacactttctctgtttttgactgcttctttatcggcctcttgtcctaatcttagtaaacttgatgatgttagtgctaaaaattccttcatcctatcttcaatatcaccctgtccacaagtagtaaacaaagcaccaaaaatattattaatggctaaagccatacaatgcatattgttagtatggccttccaaacttgctcggtanaaagattgatcgcttcttgctaattttggaatagaaacagctacaaaaaccatcaataagcatactaacaaatgttcatcctcctcgtgttctgacttctgctgcctcaaagcatttgctanagttggatctactttacaagtcaaacctgctgccgatgacatctcaagaaacaattttcattgggtctccacttggcaatgatgtttaatgtccttggatanaacttataaaaatggtatacgctgttctaacacgtctactanagatct

SEQ ID NO: 186 - DNA, 498 bp, Ctenocephalides felis
aaaacttcaaagaacattccatccaatggattttcaaacattctcatcatacggtagtttgatataggaaaattaacaaatacaataacaatatattaaactattcatattagttatactatttatttcttaatccacaagttcagagacttcagtaattgtagcatctgctaacatgccttttttgtcaccagttattacatgaccaacaataaaagctttttgcttttcaagctcataaatctctttaatatatccttctgcatctgcttttggtaaagctattaataggcctcctgaagtttctggcaaatatccttctgctagcttaaacattttgctgaagattttggcaacttcggaacatttgtaaaaaactggtagtttattcaatacaaatgaaacattatttttctgattctgggccaaattatcagcatgaccgagaattccaaagcctgtgacatcagtagcatcatgagcattatatttatgcaa

SEQ ID NO: 187 - DNA, 498 bp, Ctenocephalides felis
  misc_feature (424)..(424): n = unknown
cattcagcaaaggaccggtgccttctggcagtggtattgatccacgagcaatagttctaacattttctgcagaacagcaactaccagaaccgctacctccattggaaccacgaggagctaatatgtattctacttcttgacctaaatctaggtttgatgtgtcgccttcaaaattgctgaaatggaaaaacacttctttatcatgcgaaatggtctcgataaaaccgaaaccatccttcaaggctgctacaaatccttggcacaactggccgttgctcaaagactgacgtccatttttggagacaccattgcgcaatgaggtgcttgattgtgaagttgaactactgctgcttgacgagacagttgaaccgttaaagctgtggtttgatgactggttactaatggcagttactacaacatctgntgctatcagttctttattacgcttacctgactaatgttgaaatcaactttatcacccattctaggttgccgatc

SEQ ID NO: 188 - DNA, 549 bp, Ctenocephalides felis
  misc_feature (539)..(539): n = unknown
gcacactggtgctgttgtaacattggaagttgcaaaacagggagctatttatcatggtctggctacattacttcaacaaccgagtccacttttgaatcaaggcccaagaagaatgtcggaacgcgatttgccgtcacgtgttagtgcagagggctcggttaaatctattctgccatctagtaaatcagtaccagcactgcaccatggtggttcttcgatgcaggaaatgtcagtgcaatcagctaatttaaaatctcatagcacccataacttaacacaaaatacaacaccacagcaagatcaaggtttttatcaaaacctaagtgtatatagaggaaattcatcacagccaaatttagatcgtggatcaggtttaaggtccccacagaatatggttcaacaaaatgtgcatcagagttctaggccagcttcagcatactttcctaaccaatctaggtgccaatcaaacttcaaccaacctgttctaatcttagatctcaaagcactaaagatattgaaacttttgcgtgaaatcttgnccaacagtta

SEQ ID NO: 189 - DNA, 549 bp, Ctenocephalides felis
gacaaccctatcagtccagcgcagagtttatataaatagggatgaaaataggcaagttgcctccgtgatgcaccattctgatctgaataatttgttgagagttggcagtttgatattcttaaatgtcggtcaattgctgccgcatcagctgcagtcgttccacacgccgaattacatctatccgattgggtatcagattgtcagattttactggtcgatgaggaggccgaataaacggtgcagatatatttgttcaatagctgatgttgctggacgtccagaatttcgagtacgcgttcaagaacctcaacaggatgatattgaactaagagatgctacaccaagggctgtttggaatcgaattctggagccattggccgctatgagaagggaattgggcgattcagttcgtctgtttcccaagtacgtcactggtgaagatttgtttggacttactgagccagctgttgttcgagtactcgaagtttaccaggaattgagacattaaccgatatcgcttcaagtatggaaggaccccttattgagctc

SEQ ID NO: 190 - DNA, 550 bp, Ctenocephalides felis
  misc_feature (18)..(18): n = unknown
  misc_feature (56)..(56): n = unknown
  misc_feature (118)..(118): n = unknown
gctgtacgcagttatggntattgacacattaccatccattaggctctttgtacgancacctgaacagaacaaccttgactcataaccaaatggcacatatttgtctttcaattgcagntggattggttcacttacattcagaaatttttggaacagagggcgaaggtaaaccagctatggctcatcgtgatatcaaatcaaagaatattcttgtgagagtaaatggaacatgtgttatagctgattttggtttagcagttacacatacacaatctacaggagctctagatgttgcatctaatccaagagttggaactagacggtatatggctcctgaggttcttgatgaaagcatcaacatgcaatgcttcgaagccttcaggcgcgccgatatctacgctctgggtcttgtctatgggaggtcgctaacagaactctttcgaatggcattgtgaagaattaggccaccttactacgacgtcgtgccttctgatccaagcttgaggatatgcgcaaagtgtctgcgtgccacacagaccagtacacctac

SEQ ID NO: 191 - DNA, 492 bp, Ctenocephalides felis
gcatgtggtaacatgtttcaactgctgcaaggacattcagcagaaacttctggaggtcttttgatctgcctcccaagagaacaggctgcagcttattgcaaagacattgagaaacaagaaggttaccaagcttggatcattggaattgttgaaaaaggaaatcgcacagcaagaataattgacaaacctagagttattgaagttccagcaaaagattagaatgataatgatatgattatttaattacagaatgaaataaagggtgtatgtctgtgtcaacattatgctagttaaacaatggcatctcattcctgctatttgcaatgcttcaatatttttttgaaacaaattgttctattaatgcaaatgtagattttaagaatatatatagataagaattattgttttaagagtaattttgaatcatgaagaaatttcttgatttttcaattcttaataaagtcaaaagtaaaaaaaaaaaaaaaaaaaaaa

SEQ ID NO: 192 - DNA, 479 bp, Ctenocephalides felis
  misc_feature (387)..(387): n = unknown
  misc_feature (447)..(447): n = unknown
ttttttttttttgggaagttcaatttattttatgaatatagtatttagaacttcatacgatgtggatattgggaagatttcaaaccaaacatagctgacaaatatgtatacaaaagtttgtggtctgggtgcttcttgattactcctaaaaccattttgtctacaagcttttggtcattcttcctttgctcagttggtttataagcctctttcttggcagcaaaaatatcaccttcctctttctttgcacgcttgttcttttgccttttgaaataatcatcattgatgtgttctggtaatttaactccactaacgtctaatcgggtagaggtggcaatgacatagttttgggaaatgcgacgcaatgggcatgcattgattaagaanggacctgtaacaagtaacaatccagagtccaactgtttaagaagaactacacgttttccnttatgttgtccagctaaaacaatgcaaatcgt

SEQ ID NO: 193 - DNA, 528 bp, Ctenocephalides felis
  misc_feature (380)..(380): n = unknown
  misc_feature (394)..(394): n = unknown
  misc_feature (406)..(406): n = unknown
  misc_feature (427)..(427): n = unknown
  misc_feature (431)..(431): n = unknown
  misc_feature (436)..(436): n = unknown
  misc_feature (451)..(451): n = unknown
agtttctggttacattccccaacgttattcctccagaaatggttgcagctttagagagatgtcttccacctcgaccagtagttgagattcctcctggtgctgaagaatgtatgcttattgacatggacccagaacaagaggcacgaagacgtagtcataaaaatgcatatgatgaagatgatgagggaggacctggagcaaacagagttcaatgtgccacgagttaaatcgtagtaacttagggcattgttttaaagtattgtctaacactatttatataattttcctacgatgataacatgagttttatgtcatctatcatatttatcatattgatacttggttagggttttacattgcacaattatttgtgactttgnaattacacacgatnttatgctccacngtaacggatgggacacccaantggnctaanggtaccattttttcntttttagatagacaatctttattttttgtatgtttcatagctgagaaatgcctggcctatgtgatatttgttccagt

SEQ ID NO: 194 - DNA, 370 bp, Ctenocephalides felis
ttctgataacaaaaggccctgtggataaagtctccatccctgttccgttacaatgtgtacatttgacaggctttgtgccaggctcacacctggaacctctgcatttctgacaagtatctactatgttgacattaatatctttattaactcctcgtgcagcttgagagaatgttagtttcatagatacttcttttgcaccaccaaatccaaaactggattcagcaaagtcatcaaaacctccagttttaaatcctgcatcaccaaatattttgtgaaatagttcttcagggtcgattgtcgattgatacttccaactctgtgagaagccttgagggcctgctccccccatgccgcccatctgttcagaggt

SEQ ID NO: 195 - DNA, 343 bp, Ctenocephalides felis
aggtggcggcgtcatcgtattacaaggactggtctggttcatttctaatccgtttgcaagctgttgaagtttagctaaactgaaactagtattagctccagtttgctctacaggattgccttggggagtaggagtcgctgtcggggtcggtgtctgcggtgcagacggtcctggtgtatgtgaatgtggatgcgtgcctgattgaatataaaaatttgtagcagtggaaactgcacatgaaggcgatgatccatgcctttgatgtggactcggcagaggatgctgagctgtgggaatactaccttgatttgacatcctatgttgtatcacagaactcatcggt

SEQ ID NO: 196 - DNA, 749 bp, Ctenocephalides felis
  misc_feature (177)..(177): n = unknown
  misc_feature (416)..(416): n = unknown
  misc_feature (518)..(518): n = unknown
  misc_feature (536)..(536): n = unknown
  misc_feature (563)..(563): n = unknown
  misc_feature (567)..(567): n = unknown
  misc_feature (672)..(672): n = unknown
  misc_feature (687)..(687): n = unknown
  misc_feature (730)..(730): n = unknown
ttttttttttttttttttttttttttttagactatagttctatttattctttagcattttttgatgttacatttttacaataataccaagtaaaataatgacttcattcatataataaagggtttaatacgccgatttaaaaacagacatcttatacaaaattaaaatggctgctgntaaattatagaatatcttttgatttaaacaaaatctaaatagtacataaaactggacattacttccattatatatatagatatatacatatgtatgttaatgtatatatacataaatacatatagaatcaaacaatatcacaaactgttgatttgaataagttgctattcataaaattatgttttcgcatttagtacattttttgtatgtgcttaagatgtatataaacacatatttgntaattagtaaaaattaacataagcttgagacattattaggtgctactaaaattgataaatatttacataaattaaaacaatttcaattcttatatgtgtggnagtaacttcaaaatctgnggaaatattggttaaattggtactggnctgnaaataatttactaaacagaaattatattgactcctatctggcattggcttcttaaccattttaaatttaatttacttaatctcttcagaaatagcttaataaggngagacatcccagganaattggtggataaatattggtaaaagctcaacaggaacattgngacctgaatggctggcaaa

SEQ ID NO: 197 - DNA, 210 bp, Ctenocephalides felis
ggaagcaccttaggctgtgcaggacatgtaactgtatagcattttgtgcccagagccataggtccgcaattatgacgtaacggatcatatgcaaaatttgcggggcaataatattgggttcctatactattttcgtcacaataataatagctttgacaatcatttatatttggataaaatctcgatggtgacggacatttgaaaccttgt

SEQ ID NO: 198 - DNA, 185 bp, Ctenocephalides felis
accacgaggtgcaggcggaattccagttaaatcaaaggttcctaaacgattgttatctttggtcataaccctttctccttcatagacttgaattgttactgcaggctgattgtctgcataagtgctgaaggtttgtgttcttttacatggaattcttgcattgcgttcaataatcttagccattg

SEQ ID NO: 199 - DNA, 223 bp, Ctenocephalides felis
cacggccgaggggttcagagttgtcagtcttaactgtgaaggaacctcctgcggaagattcccaaaggtattgttcatcatcattgtgcttagatgtgaccgtgactttatcagcaacgagataggccgagtagaaaccaacaccaaattgaccaatcatactaatatcggctccagcttgtaaggcttccatgaaggctttagttccagacttcgcaattgt

SEQ ID NO: 200 - DNA, 465 bp, Ctenocephalides felis
cgaaagataaggactccgattgttctgagagcgggctttggggcaatgtggaggcgcaggccgccttcctggggcctaatatatgggataagacattaccctatgatgctgatctcaagtatgtggatctagatgagttcctttctgagaatggaatccctgtggatggaatgggtcacagcggtggattggggtccatgagtcacttaggtggcttaggaggatctcataggtctgaggctttaggtcaccctttgagtggtatgccaacacatctaacaaagattgaaagatcaccttcaccttccgaatgcatgagcccggatactatgaatcctgcttctccagctgattcaacattctcaatggcttcttctgggcgagattttgatcctcgaacacgggctttttcggatgaagaactaaagcctcaacctatgatcaagaaaagtagaaagcagtttg

SEQ ID NO: 201 - DNA, 312 bp, Ctenocephalides felis
attcttggctataagttcgttgcatgttttgcaagtgatttgtttattgcatttattcccgtggcatattttacatgaatcagagtttgcattacaatcgttaccctgatctgatttgcatcctcgagtaatgacacctttttcaatttttgaatagcagtcgtcctttggattcatacaaactttggtcttcgtctttcctgcatctttgaaacattcgtttcttagttctggaagtttttgaacgttacaacccgatttctcgcaacacattttttctcggttagtcgagtcacaactttctttaaccgt

SEQ ID NO: 202 - DNA, 209 bp, Ctenocephalides felis
attcagggctcttgctcttttctcatctcttgtcaaatgttcttcaggactgtctccattcttccgttgcttgtctttcttgtccctcgtttgaggtcttggagtagcacctgccatgtggggtgacatgtggtaggtgtgattatgggctataggatcgtaagctgccctaatgctctgctgacgagcaaagtccattgtgcaggagt

SEQ ID NO: 203 - DNA, 293 bp, Ctenocephalides felis
  misc_feature (7)..(7): n = unknown
ccggagnctggggtggaagtggagcttttgaaggatgggtattggtttctgcccaaaattacaagagcaagatttgaagaattatgctctgatttattccgctctactttacgcccagttgaacaagcgttaagagatgcaaagttagacaaaggagccatacatgatgttgtattggtgggaggttccacaagaatacctaaaattcgatctctgctacaagaattctttgcaggaaagaccttaaattcttccataaatccagatgaagctgtggcttatggtgctgcagt

SEQ ID NO: 204 - DNA, 377 bp, Ctenocephalides felis
  misc_feature (22)..(22): n = unknown
  misc_feature (28)..(29): n = unknown
  misc_feature (53)..(53): n = unknown
aaaaaggatataagaaccgatnttaggnntatgagacgattacgaactgctgnagagcgtgcaaaaagaactctaccaactagtacggaagcatgtgtggaagttgaagctttgaaggatggtattgatttctgcaccaaaattacaagagcaagatttgaagaattatgctctgatttattccgctctactttacgcccagttgaacaagcgttaagagatgcaaagttagacaaaggagccatacatgatgttgtattggtgggaggttccacaagaatacctaaaattcgatctctgctacaagaattctttgcaggaaagaccttaaattcttccataaatccagatgaagctgtggcttatggtgctgcagt

SEQ ID NO: 205 - DNA, 452 bp, Ctenocephalides felis
tttcttttaaattcgtccatgagatgatctactagacgattgtcaaaatcttcaccgcctagatgagtatcaccggcagttgctctgacttcaaatagagatccttcatcaattgttaaaacagatacatcaaatgtgcctccaccgaggtcaaatattaacacattcctttctccttgtaggtgtttatctaagccatatgccaaagcagcagctgttggttcgtttataacccttaaaacattcaaacctgcaatgacaccagcatcttttgtagcttgccgttgagagtcattgaaataagcaggaacagtaataactgcatctttcactttctctccaagatagttttcagctgtttctttcatcttaactagcaccattgcactaatttcttctggtgaaaagcgtttcagttggttcttgtattcaacttcaattttaggtgttgt

SEQ ID NO: 206 - DNA, 500 bp, Ctenocephalides felis
  misc_feature (2)..(3): n = unknown
  misc_feature (170)..(170): n = unknown
  misc_feature (306)..(306): n = unknown
  misc_feature (372)..(372): n = unknown
  misc_feature (474)..(474): n = unknown
  misc_feature (486)..(486): n = unknown
  misc_feature (492)..(493): n = unknown
tnnttttttttttttttttttttttttttctgacgttgacacatccattgcttcaccacttcctgacgcatcaccagaacttaacttacgtttttttgtaggttcttcagacccgttagtagcagattgagaagcctcttgttcatcccccggttctttcttaatactgnaatctacgtatccagtaagccattcctttggtgtgttttcatttggctctccgtgtttgtctagtttgcctgcggctatcaaagacttcttttgtgatgccttaggtcctaagccccattttctgggatatgtatntcgctccattatcacacgttttaatttagcacagactccatggtcgcatgacatcattgttgctgnggtcattagagcgattgctaatgcaatagcttctcccttagtagtaacaataacaatttcctgattcatctcgattccatcttcatacctcaagacgccggnaacataactttngaccgnnacaaaca

SEQ ID NO: 207 - DNA, 264 bp, Ctenocephalides felis
acgtggtagaaattctagaagttgccaatttcttctgtcgactagttcgaatggtgtgttggttacccattcgtgatcatactggttcagaagataacaaccgacagtcatgcctcccaaaaagatcaatccaatggctccgatggagaaaaatcttcctttacatttgcagctggtttcagtatacaaatattgaccttctatatcttctgatttttttaaaagtggttgttcttggttgccttctgatggtggttgtgttgt

SEQ ID NO: 208 - DNA, 498 bp, Ctenocephalides felis
  misc_feature (111)..(111): n = unknown
  misc_feature (337)..(337): n = unknown
  misc_feature (348)..(348): n = unknown
  misc_feature (369)..(369): n = unknown
  misc_feature (453)..(453): n = unknown
  misc_feature (472)..(472): n = unknown
  misc_feature (493)..(493): n = unknown
atttccttgtgctaattcaattgttcggggatgaagtgccagctctggaaccccttgaacaacttcagaaaccaaatcagcaactctagcctgacttgtctgtgaaccagnttgtccaggtgtgttagcagaactttgaatgataagattttggttggcagcaagactctgtccacacatatttctccgtttatgagatgctaaatcattactttgggcaaaagctctaccacaaaccatacaagcgtagggcttttcacctgtatgtgtcctcatatgtatagctaacttatcagatcgtgcaaatcctctgttacaaacactgcatacaaatggnttttctcctgnatgttttctcatatgcaatgnaagatctgtagttcttggataacctttaccacagattttgcaaaaatttgtcatttgaccagtatgtctccgcatatggacggntaaattacttcttgactgnaacttttaccacaaacactgnataat

SEQ ID NO: 209 - DNA, 470 bp, Ctenocephalides felis
  misc_feature (38)..(38): n = unknown
  misc_feature (65)..(65): n = unknown
aatcagattacagcttatttcacaaaaaatgagaaatnaagaatccacaactaaatacaatatgngtaaacaagataaaaatataactataaacaaaatataaatcaagttaatcttgaacataattaaataaactttttgtcaaaaactacagtaaaaataataaaaacatttcatataaatgtaaacaaaattgatgatcattgataattcttgttaaatgtgcttttttaaagcaaatttatttacatattaaacatctgtgaattttgataatttatctcgtagcatcatgttttctttcttcattcgctcaagctcttggcgaagaccaatattctccttctccaagtatcctgcacgtaaggctatttgattttctttcatgcgtcgagcatctcgagatcgcttggctgccatgttattctttctcctctagcccaatcttatcatccttcaaattatcaggt

SEQ ID NO: 210 - DNA, 500 bp, Ctenocephalides felis
  misc_feature (3)..(8): n = unknown
  misc_feature (18)..(21): n = unknown
  misc_feature (23)..(24): n = unknown
  misc_feature (61)..(61): n = unknown
  misc_feature (79)..(79): n = unknown
  misc_feature (117)..(117): n = unknown
  misc_feature (402)..(402): n = unknown
  misc_feature (426)..(426): n = unknown
  misc_feature (447)..(447): n = unknown
  misc_feature (488)..(488): n = unknown
ttnnnnnntttttttttnnnntnnttttggacctgaaaactatttattatcacatttattnaattacataatgattacnacttaacaactattcttaaattctagtcagatatcagncatataataaatacttaagcttttataagaaaaaatgcatcactagataattttttcagcccttattcgattaattttaatggctttgtttaatcaacttcttctatcgttggcccttgccttccaccaaagcctccggcttgctgcccacaagtttgtgcttgtgctccacttgaattggcttgatgtagcttcatcataagcggcgtacaaatctgttggaactctttctctttttgttcatattcatggcattctgcttggggattctgatctatccaaganaatatatcatcacatgccttgcgngctggttcacaatcttgctgnggaagcctgcttccacatcggccagagcttggtttacttgnaagcatatcctc

SEQ ID NO: 211 - DNA, 263 bp, Ctenocephalides felis
ttcatttcaggcataaattctgttgttttgtgaccattaataacatcaacccctggtaacatatgaccaggcccagtgtagtgccctggttcatattcaaatttcacaggtgtgctcacatgtggagctaaaggaggagccagagatctgagatgatttccattagaggatggtggactgttttgttcttggaagtatcttctggcaaacatatggtgtttcttctgagcaacaggaggctggcgcgaggatatcgaggcggt

SEQ ID NO: 212 - DNA, 244 bp, Ctenocephalides felis
atggtgcggtgaaagcaaattaccattaaaatatgtatttcccacacaaaatgggaaaaaggaattttgctcggagacctgcattgcagaattcaggaaggcttatagcaagggagcctgcctacaatgtgataatgtaatccgaggaaactcatctaccagtcgagagttttgttctaccttttgtatgaacaaatatcaaaaaaagaatgataagaatctcataaatttacccgttacgagt

SEQ ID NO: 213 - DNA, 418 bp, Ctenocephalides felis
atcatcagcaaaaccagcagtttaataatcagttaaatcaacaaaatcaacaagtaaatcatcagcaaaaccaacaatttaataatcagctgaatcagcaattgaataatcaacaaaatcagcaatataataatcagaatcaacaattaaataatcagcaaaaccagcaaataaatagtaatcagataaatcaacaacaaaataatcagcatgttaacacacaacaacaaaatatatctcaaggaagtaagcaagtaggccagggcaatcaaattccacaggtgcagcaacagcaggtgccgaccatgtagcttctgtgaatcttaacaataatattccacataaatctggggaaattcaaaacagtgtgtagacagtatacaactcctgagactctctattccaagcaagaccccgt

SEQ ID NO: 214 - DNA, 498 bp, Ctenocephalides felis
  misc_feature (494)..(494): n = unknown
aacgtaaagacaaaggtaaatctcgtttcacagcttatatgctctgggctaaaggaattagaaataaaatcgtaaaagaaaatccttcaattgatttttcatctatatcaaaaaaattaggtgaactttgggcaaatgtgcctaatggagagaagtataattggcgtcgaagggctaaacgtatggctatgaaagtagcgagagatgaagaaataaaaacatctgataataaagcacaatttataaataaaagcaaatctaataagccctcccaattctccacttcaccaacagtttctaagaaacttgatatagaagatttagaagtgatgcctaattcccaacaaaattctgataatttaatgttgagccccaaatcatcagcaatgagcagcggtttatcatctcaaggcatgtataaggtaacaggaagttccccaattgacatagctgcttatctaaagttacttggcgagaggttgagtattattggnggac

SEQ ID NO: 215 - DNA, 398 bp, Ctenocephalides felis
gccattgcagccactactgaagttgaattcaaagaagctaccacaattaaggaatacattaaggatcccagcaagtttgctgctgctactgctgccgctccagctgctgctgctgcagcacctgctgaatccaagaaagaagaaaagaaagaggaatctgagtctgaagatgatgacatgggtttcggtctctttgattaagaacttgttccacaatattaacattttgggaaatccatatttatatgaatatttacatattcaagtctgtttgtgattattatctgtaaatacttgtctgaactttgcgcagttctgtggcaatttacaagattttatttgtaagcataactttgtataataaaatatggatgaggataaaaaaaaaaaaaaaaaaa

SEQ ID NO: 216 - DNA, 549 bp, Ctenocephalides felis
gagccatcttatcaaacatatttaatataaatttataataaatcgtgcaaagttttcatgttttaattaaaataccgattgaggtaatacgaagtacaatggtggataataaattagcaggattaacagaggaaaagctacgtgttttagtaaaacaatgtaacaaatgcccgaaatgtaatgaaatttgtctagaggattttcccgttgttcaatgtagtttgaaccacagactttgcaagacgtgctttttggcttccataaatgatccttgcttccagtgcactaagggcagcaaaccatccgctaataaaaaagatcggccaaagcagccaaatgccccagacaattctttcccgaaggtaaactgcaaatatgccagtgacggatgcaaaatctcaaaaaagaaggacaaaattagatttcacgaatcggaatgtgtgtttcaaccacaagaatgtctggaaaattcactgtttatttaattgtactggccggtatttcaacgcatgctacctttgtgagaacatcattaaatggaacacatga

SEQ ID NO: 217 - DNA, 549 bp, Ctenocephalides felis
caaacgtacataagaatgggagcgattattttaagttcagattaaattgtatatacttttgattcgatgtacgggcgcaatcatcacactcggagattgcagagagcttcaactgctgcacttctcgaaaacaccaacgaaaggttgccggtggcgagcgactgcagcacaggccctagcgtgcgttcgtccagctcgaacccgttgcaagccagcgcgagcactagtgctactatgatggcttccagccgagtgcccagtccgcctctgcaggaggtcaacacacccgtagctgagaactggtgttacacacaggttaaggtagttaaattcagttatatgtggaccattaataactttagtttttgccgggaagaaatgggcgaagtgttaaagtcttcaacattctcagcgggcgcgaacgacaaattaaagtggtgtctacgtgtaaatccaaaagggctagatgaagaaagtaaagactcctctactgattactacttgatctgtacaaatctgaagtcggccaattaattctcgatttaatgc

SEQ ID NO: 218 - DNA, 547 bp, Ctenocephalides felis
  misc_feature (446)..(446): n = unknown
  misc_feature (449)..(449): n = unknown
  misc_feature (451)..(451): n = unknown
  misc_feature (534)..(535): n = unknown
tttaacgatacacaacatgacactggcagaatcgctacttatgaagaaatagttgatttgccgcagaaaccagaagttttacttattgatgttcgtcaaccggaggaattggagcaggaaggaaaaattccgacggctataaacattccattacgtgaattggaaaatgctctcaagaacatgtctcctgaagaattcaaaaccaaattcggaagagataaaccaacattcgatactgaaatcatttttagttgccgttccggaaaacgagcaaaggaagctatggaaacagcattgggattgtgttacaagaaatcaagatactacgaaggtagctttttagaatggagcagcaagcagaagaaacagtgaaattgcagggttaatcaaatattttatatgatacacatattatttacagatatgatcaaactaagtattcttgnggngntatattagcatattgatattttcttacgaaatgttcttaagatgatttaaaaatattgtgaataaattgttacttttagattnncctaataaaata

SEQ ID NO: 219 - DNA, 549 bp, Ctenocephalides felis
  misc_feature (452)..(452): n = unknown
  misc_feature (513)..(513): n = unknown
  misc_feature (540)..(540): n = unknown
gtgatgtcatttgtgcaaaagaaacaaactgaatgggaaccggagtggtctggagatgagagtataatggcattaatgaatggtggagaattatttatttatgaaatagataaatgtgagtttggaacatcatgggatggaaagccaaccaaaaaaattgggggaggtcgaaatggaagaataagcatatcaccatctaatactacaaccactttagctttttatgtacctggtgcgcaagctcagccatcgacttgcaaattatttgcatatcctaatatcagtcaaccagtagcttcaaaaagctttttccaggctgacagggttgattttttgtggaataatcgtggaacaaatctacttcttctaacagcaactgatgttgaccaaactggtgcttcatattatggaaaacaatctttgcagtatatgagttgcaagggtgatactgnttggtcagtgccaaagaagggctgtcatgcagttgcatggagtcctaagattagagtttgngtggtacggcattgcctgtaaactcantatcaatct

SEQ ID NO: 220 - DNA, 549 bp, Ctenocephalides felis
  misc_feature (4)..(4): n = unknown
  misc_feature (527)..(527): n = unknown
gctntttagacgttggaatctaaataattaaataatgataccgaaaatattattatttagtaactaatttacgaaaaaagtattttttaaattaagtaacatgtcagcatcagcaagcagatcggaatttgcaatcacagaatctaaccaacaagaagatgaatgtggaccacaattaatttctaagatagagggtaatggtattacaagtggggatattaagaagttacaagaagctggatactatactgtagaatcaatagcattcgcaccaaaaaagagtcttataactataaaaggaatatccgaagctaaagctgataaactattagccgaagctgctaagcttgtgcctatggggtttacaacagcaacagaatttcatcaaaaacgatcagaaataatattgttaacaacaggttcaaaggagctagataaactattgggcggaggtttgaaactggatcaataacggaagtttttggtgaatttcgtcagggaaaacacattatgcctacattagctgnaattgcagtacctatagatcaa

SEQ ID NO: 221 - DNA, 549 bp, Ctenocephalides felis
  misc_feature (481)..(481): n = unknown
cttgaatagattatttactttgtccttaaatttcaaagaagtccctacgcgcaccaagatgggtagggaggacaaagccacctggaagtcaaactactttactaagctcgtccaattgttggatgaatacccaaaatgttttattgtgggagccgacaatgtgggttccaagcaaatgcaacaaattcgtatgtctttgcgtggaagcgccgttgtccttatgggcaaaaacaccatgatgcgaaaagctatcaaaggtcatgttgagaacaaccaggctcttgaaaagcttcttcctcacattcgcggaaatgtaggatttgtatttactcgcggagatcttgttgatattcgtgataaattgttggaaaacaaagtgcgtgctccagctcgtgctggtgccattgctccattgccgttattattccagctcaaaatactggtctaggacccgaaaagacatctttcttccaagctctgncatccaacaaaatttcaaaaggactattgaatcatcaatgatgtcatatcttaaaacctggggataaa

SEQ ID NO: 222 - DNA, 550 bp, Ctenocephalides felis
  misc_feature (11)..(11): n = unknown
  misc_feature (17)..(17): n = unknown
  misc_feature (21)..(21): n = unknown
  misc_feature (111)..(111): n = unknown
  misc_feature (128)..(128): n = unknown
  misc_feature (177)..(177): n = unknown
  misc_feature (456)..(456): n = unknown
  misc_feature (466)..(466): n = unknown
gcgaggcgganattgtnagtncttttaagtattaacaatttaattaagtttttatttaatttcgttatttttttttaagtttttacgtgaaagactttgaggagtgattgnttatcagcaaccaacanaaaatggggtccgagatgaaaagtacatgctacaaatgcaatcgcgtangacactttgccagagaatgcacccaaggaggcggaggtatgggaggtggccgggaccgcgatggcggtcacagggactcgggccgcgtgcgtgagaaatgctacaagtgtaatagatttggccactttgccagagactgcaaggaggaggctgaccgatgctacagatgcaatggcactggacacattgctcgcgcttgtctgcaaagcccagatgaccatctgttacaactgtaacaagccaggacacattgcgaggaattgtctgagagccgtggtntgactccagntaggtcaaccaacgtgttcaactgcacaaaactggtcatatttccgtactgccagaaatgctagacttgtatgctgtggaaagc

SEQ ID NO: 223 - DNA, 549 bp, Ctenocephalides felis
caagttttgtctgcaatatataaaaatttaagatggctaaagcaccagcagttggtatagatttgggtactacgtactcctgcgtgggtgttttccaacacggaaaagtagaaattattgcaaatgaccaaggaaacaggactactccttcatatgtcgcgtttaccgatacagagcgtctcatcggagacgccgccaagaatcaagtggccatgaaccccaataacacaatttttgatgccaaacgtcttattgggcgtaaattcgaggaccaaacagtccaagctgatatgaaacattggcccttcgaggttgtcagcgatggaggtaaaccaaaaattagagtatcgtacaaaggagaatccaaaaccttcttccctgaagaagtcagttccatggtgttgactaaaatgaaggaaaccgctgaagcttacttaggcaaaactgtgaccaatgctgtcgtctgacctgctacttcaatgactcacaacgtcaagccccaaggattcgggactatctccgtctgatggtgagatataacggcccccg

SEQ ID NO: 224 - DNA, 550 bp, Ctenocephalides felis
  misc_feature (544)..(544): n = unknown
atacgataggcatttgtgcgagataattgattattgtgtgaaatttatgtgaataaatctgtgaaccgctctgtaggttacgatttgtgttcaatgttaaaagaaatgtgcaaacagtgaattcagatctgtacaagtgacatttgcatttaacaaatatggggaagacatactgtcaatcttgtcgcaaaaaatgttcaggtgaagttttacgagtctccgacaaatactttcatactcaatgcttccagtgcgtgcagtgcaataaaagtctcgcccaagggggcttctttcacaaagacgataaatattattgtacaggagactatcaaaaattatttggtacaaaatgcgcagtgtgccagcaatatgttgaaggcgaagttgtatcagctctaggaaatacttaccatcaaaaatgtttcacatgtctagttgtcgtcaagctgtgccgccggagaaaaagtaacatacaccggaaaagaagtcctctgccagaaatggttcaaatccagcagacaagtcaacagtcacagaaagtccntagtca

SEQ ID NO: 225 - DNA, 549 bp, Ctenocephalides felis
  misc_feature (30)..(31): n = unknown
  misc_feature (446)..(446): n = unknown
  misc_feature (466)..(466): n = unknown
ttttcgtgcttgtgttattttgctacatgnngctgtctgtctggttgcacgaccatacctacagtaagggctattcggagttgacaaaaaactcagatgtcgaattcattgtagaagaacattattcggaatccgattccgatgcatcggtgcactgcgaaagagataataaaatcggttcgtcgcaaagacaggaacaacatgtgataataatccaaaaatctgctgatgacatacaccgatgcgaactgtgcaataagacgtttaaatttgcaacaaatcttaaggctcatatggttatgcacagcggcgaacggccctatgtctgtgccatatgcagtaaagcttttccacgaattgccaccttgaaccgacacatgcaagtgcatactgaatttaaaccatttcagtgtgaattttgtgagaagagatttcgacaagatgtnactttgaagaaccatatcangactcataccggtgagagattaattggcatggtgtgaaaatcttttaccgcctaccactctgaacacattacgatcacatgag

SEQ ID NO: 226 - DNA, 498 bp, Ctenocephalides felis
tgaaagagatgcaggcattgtggttgattcctccggaagaataaaaagtgtaatttcaggagaagaagtggaaaggatagctaacgaaactaaagttgaggtgttggactacggtcaattttcaatatggccaggtgtgatagactctcatgtgcacgtcaacgaaccaggaagagaatcctgggaaggatacaccacagctactaaagcagcagcttggggcggaattaccacaatagtagacatgcctttgaattccatcccacctacaactactgtagagaatttgagaacaaaagtgaattcagcctgtggtaaaacgcatgttgatgtcgctttctggggaggcgtgattcctggcaatgcgcacgaattgttgccacttatcaacgccggagtaagaggattcaaatgttttacaagtgaaagtggtgtcgatgagtttccacaggttactaaaaatgatctggaaatggctctaaaagagctccagaaagc

SEQ ID NO: 227 - DNA, 498 bp, Ctenocephalides felis
cagccgttatagcggttgaaactgataatatccaaatgttgtccaactttatcttcatcgactgccctcgacaatgctattgttactggccgtgaaacatctaaacttttcacgtgatcaacgatagccgaaaaataatcatccgatgccgtaatctgagttctaggttcatttgcaatggaccacattatcactcctgggcgattcttatcacggcgaattagctcgcttaacgacatcttgtgcttagcaagcaattttgaattgtaattctctgtatctacacttggacattcattgattatcatgatgccgtttttgtccgccaggtccataacttcttccgaataaggataatgtgatgttctatatgagttggccccaatccattttattaagttgtaatcttttgcaataatagccaaatcgagaccttttcacgtatgtcagagtcttcatgtctaccaaaacctcttagatataatttcctgtgattaa

SEQ ID NO: 228 - DNA, 498 bp, Ctenocephalides felis
atgtccttgaagtcctcgagccgatgcaagggtcccatccagaccgcatattcctccggcaatctcggaacaaaaagcgtgcttcgacctgttccgacctcaacggccccgaacagatcgggttccttagcgccaaacatgtattggaagtaggattcctgtttaaaaatgtagcccacatccgtgtcgttccagctgacctcttcacctccttgcagaaggataatggatttttttaaggaacaactttgtgccgataaagcatcgcacaccttcttcctgttctcggcgaataaactcatcggaactttcagcgtttttggtcccatggagaagacccgctgctgacccgatccgttggagcacttgcatgttgattctgccattattcttttaaactataacactaagcgatttacacaatttaattaacaataattactaaaaaaattaaattaaacacatataaccaaaaattttctgtcactgaacataagt

SEQ ID NO: 229 - DNA, 498 bp, Ctenocephalides felis
  misc_feature (437)..(437): n = unknown
  misc_feature (481)..(481): n = unknown
aacagttgcatgaactttgcccttcaacgtcattcctaagtatggtgtttctttattcttgtgttggattatgtctttagtgaccttaaattcttcctcgggatcccaaattactaaatcagcatccaagccttctttgatttgtccttttatgccatccagtccagttaatcgagcggccgcccgggcaggtacttgagttccccatccaatcaatgttactgcatcacctttcttgataatatcagcttttcccaaaggaactgtgaaatcatcgacaggaacttcttctacagctgctctgtaaagcgtttttggttccagtagcaaacatggatctttttctctgatcatggataatagaagacctttggccatatttggacctcttggtatagcaatcttcaatcctggagtatgtgcaaaatatgcctcanggctttgggaatgataacaagccccgtgtccgactgcatacaangtgctcgcactgttaaa

SEQ ID NO: 230 - DNA, 237 bp, Ctenocephalides felis
ctgctgctgcaccgggaacaccccctgatactggcgtatcacaaaattgagaattatgttggttcaccaattgtttaacttctttggcaactgctggatcgattgtgctggaatctaagaacaatgtatcttttttggcagatgccaccattcctttgtaacagtctaatactatggcgttgtttggcaacattgtgaccacaaagtcggattttttggcaacttcggcagccgagg

SEQ ID NO: 231 - DNA, 171 bp, Ctenocephalides felis
tgcttggagaaagtgcagttggaaaaagttctttggtgttaagatttgtcaaggggcagtttcatgaatatcaagagtctactataggtgctgcgtttttaactcaaactgtgtgtctggatgacacaacggttaaatttgaaatttgggatacggctggacaagaaaggt

SEQ ID NO: 232 - DNA, 315 bp, Ctenocephalides felis
tgatagagtgcatggccaatatgaatatccaaaaatattataggcctctcattacgatcatcatattgcccaaaagtgggtccgtggtctcgtcgatgaaaaaattatggtccacaaaatgatcaaaatctttcacgcccatttgtctgaccagctctggatctcgtatcagcaatacaggttttaaaacttcatagaaacctgaaaatctgctatcaggaaaattctcataagctcttccgtaggtataaatctgattttccaactggaaaaagtttctccaggtgcttccaaggatcggcacaggtttcaggt

SEQ ID NO: 233 - DNA, 247 bp, Ctenocephalides felis
agaactacttgcatcttttttaggatgtcttttgccacacattctgcggaacatcacttgagcaataaatattcataattttgcgaattccttgattttaaacaagcgcagacataatgtatgtatatatgtatatatatatatatatatattgaatggtagagtcttggatttgtgtatattttgtagagtttcgaacaagaatccaaaaataatacaaaaaaaaaaaaaaaaaaaaaaaaaaaaa

SEQ ID NO: 234 - DNA, 330 bp, Ctenocephalides felis
tggtgaagaatttgccggtcgcctagccaaagaaggaatacgatataaattaaagggaatggtagcagacccagaagaatgtgatatggaagaattggttagcatgaagtctataccaaattcacttgcggtgttctgcttagctacgtatggtgaaggagatccaacagataacgccatggagttcttcgaatggatccaaaacggtgacgccgatctcacgggtcttaattatgccgtttttggacttggaaataaaacctacgaacattacaatgaagttgcaatttatgttgataaacgattggaagagttgggagcaactagagt

SEQ ID NO: 235 - DNA, 417 bp, Ctenocephalides felis
aattaaatgcaattatatcaattctggcataaatccaaggcactattttgactattttctaattgcaaaatatcaagtgtttaataatgcaaaattttcttaacagcatcaaagcaacgccatttgtcgggtagataaaacggttcaaagacatgagggaatggtgtatcgtggccggtcactctttgaataggagcctcgagatgcaaaaagcattcctcctgaatggaagcagccagttcagccccaaagcctccagtgtatggagcttcatgtgcaataatgcaacgaccagtcttctttactgaattacaaacagtatcataatcccatggtagtatcgaaacaagatcgataacttcacaattagcatcaagtttttcttttacaatctcagctacttctcgtaaaacatgt

SEQ ID NO: 236 - DNA, 112 bp, Ctenocephalides felis
  misc_feature (58)..(58): n = unknown
ctggtttgcaagtcattccactcggacatgtttccaatgttgtttctaagaaatcagngccaatcgcaatgcaaaggtttgctgtctcacaatcctggcactttatttctcc

SEQ ID NO: 237 - DNA, 325 bp, Ctenocephalides felis
actgtagtctcgtgaaatttgtttattaaaatccgaaagtaatggataattcaaaccacctaagccgcctacttttctatccatgttaatccatgctaagtggctaaaatgtgaatccgttgagcatccaacaacctcagcaccgatttcccgaaactggcctattgcatcactataagcacgaatctccgttggacagacaaaagtaaaatctaaggggtagaagaacaataccaaatatttgcctttataatctgttaagctgatcttcttaaaatcaccattgacaactgccataccttcaaaatgaggggctggactttgt

SEQ ID NO: 238 - DNA, 500 bp, Ctenocephalides felis
  misc_feature (10)..(10): n = unknown
tgaagccctntgtgccggatgcgaggactgtgcaacggcttaggtcctgccatgtttggtgttatattttatctttttcatgttgatttgaatgaagatcatcttggaaataagatagaaagaaatgaaactgctggtgcagatgattatatacaattagttcctgggcctccatttgtttttggagcattgcttgtaatatgtgcacttttagtagcagttttcataccagaagagcacaaagatataagccgacgttcttctggtgtttctttagatacacattttgaaattgaacgtggcagaaaagttgcaagtcctctaccaccattgattcataccgattctgcacagctataaacatcatataccatcaccacctatgcaatacaattttattaataatgaataattaatttaaaactagtttgaaacccaatggttaatgataatgaaataaccagatacaaattacagatattttaaatgagatgtcatac

SEQ ID NO: 239 - DNA, 252 bp, Ctenocephalides felis
acgatacactcatcccattttatacagaaaaacttgataaaatagcgaaggctaataatggccatttagctcttggaagactaacttgggccgactttgttttcgccggagttatcgaatatatgagtttcatatctggaacagatttccttggaaaatatgcaggattcaagagtgtctttaataatgttgcaaatttgccgaacgtgaaggaatggatcgccaagaggccaaaaactgatttgtaattgt

SEQ ID NO: 240 - DNA, 500 bp, Ctenocephalides felis
  misc_feature (131)..(131): n = unknown
tttttttttttttttttttttttttttttattcaactcatcaattacaacatcaacaatagtattaacatcagccatagcaccattaccagtatcaccgcacaccaaagtcttagaaatgcaaggcacttntatatacccccaatcttttaaagtttttacttgtggagcggttatggggtgatcccacattctcgtattcattgctggacaaaacaggaggggcttggatgtgttccaggctcgaactgtgcaggttaggaggttgtcacataaaccatttgatattttagccaaagtgttggcgtccaacggtgcaatgcacatgatgtctgcccatttagttaaatcgatgtgtaaaacagggtcaccacgtttgttccaaaatttccattcatggtcatctgtgtatattttgacggtttggggtatttctgattggtcgaagaagtgttttgcatattctgttactataactgaatttctatatgtatattggag

SEQ ID NO: 241 - DNA, 498 bp, Ctenocephalides felis
aattttattgtatttatatacagataaaaattgatatcaagttagataacaaaatataaaatttaaaaatcaaaacatatttataaatttttttggtcttatttctagaatttattcagcattagaaacattttgaataattttcttgaatattgtgatacctcgaaggaaagtttctgtatctaaatattcatcatggtcatgcagcaatactggcgtgttattcatgggagaaaaaccaaaagccggcagtccaatttctcttatatatctgctatctgttgcagctggaaaaacttgtggttcaagaacaagtcccatttcatcagtagctcttttaaatgctgtccaaaatttattgctttcattcagttcagtgtttgctatcagtggttctttttgtcaaattctatttcaacatccttgccagcttctttgcaccattttcgtatcttttcttccaattccttgtggctaaggatggtgtaatacgtatat

SEQ ID NO: 242 - DNA, 500 bp, Ctenocephalides felis
  misc_feature (426)..(426): n = unknown
atagtcttgcttacatgaaaatttgattttataaaaatatttgctattatgcattagcaagtagcatttttgcacataaatcatacatattttaccatatgttggttatattacattattaaagcgttaactccatacatctgagctatatcttttctgtgcttccattttcttgatgtaagcttgagcttggtgtcattcatgttgcctttggacataatcactttcaaaactatgttgcgaacatcacttgccatagtccgggcatctccgcaaatatataagtggccattattttcaccaatgacattccataactcatcaccatttctctctagtaaatgagtgacatattccttttcagctttatcccttgagaatgcaacatgaattttaagagcgcccttattaatatattcttgaagntcctcttcatataagtaatcttcagacttcttgcgcaaccaaagtataagatagtatctccaacagttttatct

SEQ ID NO: 243 - DNA, 364 bp, Ctenocephalides felis
  misc_feature (50)..(50): n = unknown
  misc_feature (61)..(61): n = unknown
ttttttttttttttttttttttttgggagtaaagcacttttaatgcctgntttctttagtncttctattaagtctccagattgatgcatttgcaacatgatgtcacaaccccctacaaattctccagaaatataaacttgtggaatagtcggccaattggagaaatccttaataccttgtcttaaaacatcatccttcaatacgtcatgactctcatattccacaccgtgcatcctcataatttgaaccactgcattgctgaaaccacatttgggggcttcaggaacacccttcatgaaaactaccacttttttgtctttaacaagcttgtttattctatctgagatcgctgttgtgctgcagt

SEQ ID NO: 244 - DNA, 535 bp, Ctenocephalides felis
  misc_feature (5)..(5): n = unknown
  misc_feature (7)..(7): n = unknown
  misc_feature (13)..(13): n = unknown
  misc_feature (25)..(25): n = unknown
  misc_feature (33)..(33): n = unknown
  misc_feature (36)..(36): n = unknown
  misc_feature (250)..(250): n = unknown
rchsncnamtydnachcksmcratndatstrandsncatttgtcttcaaactgtttggagatgacagttactcggacattctcaggtataaattcatcaacaattgactctataagtttagggtcccagtgtgtcattagcgaaggaccgcaaagaacctcttcaaatttaaaatgcatcagattcttgactagataaacaacataacttcttggttgttctttatctctgaacttaaagttcatatcgntaattgcctttgattcatcaaatatccatttttgtggtgtttcctttttcagcaaattaatatactgaaaaactagtctgactatatcatcaacatggtttacgccctcttctgttaaatctgcatctagtttgaagaaaccaaatcccctcctctgaacagcaccgcaagataagcttgaactccaaccacgtgctttcaaacatgataagagactgccgggtccctcatgcccaaaaagatgacctaaataatttcctggtgcagattttctaaaaggctcaa

SEQ ID NO: 245 - DNA, 497 bp, Ctenocephalides felis
  misc_feature (464)..(464): n = unknown
ccgactgcacctgcttctcacaattatgatggtggtttccaaaccaaattgatgcacaaagacttaggcttggcctccggagtggcatcagcaaccttgacaccaattcctttgggaactttggcacatcaacttttcacaactgtcatcgcccatggtcttggggacaaagatttctccataatttacgacttcatccaggaacaaggaaagaagaaggcataaattgaaaaataaaaaaaaaattggatactgttgaaccagaaccagaaccaattttctcctaaactaacataatatggtgcctttgattaaatcaataccaatggtaatagaaaatttaaaaaaaattccagagatccaaaattaattaatccattagagtgccttcgataaaatcagtgccaattgatgcaaattcaaaatttaaatatgtttttcaggataaaataaaaaaattactngttataaaaaaaaaaaaaaaaaaaaaaaaaaaa

SEQ ID NO: 246 - DNA, 306 bp, Ctenocephalides felis
  misc_feature (34)..(34): n = unknown
  misc_feature (206)..(206): n = unknown
  misc_feature (236)..(236): n = unknown
  misc_feature (252)..(252): n = unknown
ggaaagagtttggagagctggatctccggcgatncatcaggagactacaagaaagttcttctggacgctggtcaattaattaaataacaaaaacaaacaataataggataaactcacttaaatgcaaaatcagtgtaattaaatccatcgatcaatattaataataatatataataaaacacaacacataatcagataaaggacanttttgttaatcgagtagaaaattgaatcanttttctattccaacantttatttttattatgtgttgtgtttttaattgttagtctttttgcacaaaaagt

SEQ ID NO: 247 - DNA, 498 bp, Ctenocephalides felis
  misc_feature (454)..(454): n = unknown
attctggcttggactacacaatggaaaggtctgcaagagctatcatgaagaccgcaatgaaattcaatttgggattggacttgagaacagcagcatatgtaaactctattgaaaagatcttcacaacttatgctgaagccggtttagccttttaagattaattatagcattttacttatagataacgataccagtgaaaaatcattacatcaataagctcatagtgcaaagttccttgccagtttaatttgttttacatacttaaatctattaatctgtacatgaaaaaatcactcattagaacataatgtaaatgttataatatttgcacaatcaaagtaataatgtaagcacgcaatatgtgaagaacgtgaatggtaataatctttatacatttattcatttaatataaatgaataaatgtgtaagtttgaattatggtactttaatatgnattcaagcataaatttcagcgtgataattttagttcgcgcgtcg

SEQ ID NO: 248 - DNA, 549 bp, Ctenocephalides felis
  misc_feature (3)..(3): n = unknown
  misc_feature (491)..(491): n = unknown
ctnagctcgaataatttcagtattatcacccaaaagttaatttaaaatgccgacatacaagttgacatacttcaacgttaaggctttggctgaaccattgcgcttgttgttgtcttatggaggagccgattttgaagacgtcaggttggagaaggaaaactggccagcagttaaaaacacattcccattcggacaagtcccagttttggaaatcgacggtaaacaaataaaccaaagcttggcaattgctcggtatcttggcaaacaattcaacttgggaggcaaagatgccttagaagatttggaaattgatgccatcgttgattcaatgaacgatttcagactaaaggctgctgtcgttatttatgaacaagatgaagcagtgaaagccaagaaagtcgaacaattgaccaaagaagtagtaccattctactttgaaaaattcgaggctatcgccaaaaagacaatggcatttagctttgggaaaattncctgggcagattcgtgctgctgtcaattcgaacatggacttatggccgactgttattc

SEQ ID NO: 249 - DNA, 498 bp, Ctenocephalides felis
  misc_feature (57)..(57): n = unknown
  misc_feature (217)..(217): n = unknown
ttattattttgttatatgttcttgatgattcttttggtattctggttctttctgganccgtgatgtttacgtaatatataccaaaacgctctgtgaatccacgaagccattcaaaattgtctataatgctccatagggcatagcctttaacattgcagttatcaataattatggctttgagcatttcattcaagtaactacaaatgtaatgaactcnatcatgatcatccaattgaccatgatctgagtatccgttttcggtaactattatttcaattccagggtattcattttgaacccattttaaaagttttcgaaatccttctggaacaacttttaaccaagatgatgctgcactgggccatgaggggtccgattctaattttactttctgatcagtataccaggtgttcggctttcctgaaattgcattggatgctaggcgagatgtataatggtttaatccaagaaaatcagcaagtgcctttaatatgatca

SEQ ID NO: 250 - DNA, 498 bp, Ctenocephalides felis
  misc_feature: n = unknown
  misc_feature (12)..(12): n = unknown
  misc_feature (178)..(178): n = unknown
  misc_feature (474)..(474): n = unknown
ttccgatctttngtttatgacaccatatcatctcgagaagttacaggaactgcaagatatgatatgatgcagttgttaattcaagctaaaaaaggaactcttcaagacgatgatttaggggtaactgctgcacgaaataaagaattaacaggcgatgatataacatcccaagctttanttttcctcataactggagtaataacttccacttcaacaatgggtttcggggcctatgaaatagcaaacaacgaagaaattcagaaaaaattgatagaggaagtagatgaggttagaaagaagcataaaggtgaattatcttatgagataattgataagatggattatttaggcagagtaatatcagaaactttgcggaaatggccgccgggaattattgctaggaattgtgtgcaaccttatacaatcacggataataaaaatagaatcacatttaattgcgatccaggagctgtnatatatgttcccacaatagccatt

SEQ ID NO: 251 - DNA, 175 bp, Ctenocephalides felis
cattctactttgaaaaattcgaggctatcgccaaaaagaacaatggacatttagctttgggaaaattgacctgggcagatttcgtgctggctggtcaattcgaagcatggaactttatggcccgcactgatttattcgccaacaccccctcattgaaggctgttatcaacaatgt

SEQ ID NO: 252 - DNA, 549 bp, Ctenocephalides felis
  misc_feature (437)..(437): n = unknown
  misc_feature (527)..(527): n = unknown
ctttgaccttatatcattttgcaccaagttttccgtcacgagcagcgctgttaactattagagcactaaatcttaaggttgatataaaagaagtaaatctgtttgctaaagagcaatttaaaccagaatttttgaagattaacccacaacattgtgttccaacattagatgacaatggttttgttctttgggaaagtcgggctatagctacttacttggtccaggcttatgggggtgaaaaatacagttccttgtatcctcaagctgctaaagaaaaagcagttgttgatcagagattatactttgatgctggagttttatttcctagaattcgagccatttgctttcctattctatttttgggagaaactacgatttcacaagacaaaaaagaccaactaaatgaagcatttggttatctagatggttttcttgcnaaacaaagtgggtagctggagacaactttaccgtacagataatgcattctggcttctgttctagcatacaagctgtggttcgatatttcnaatccctctgtgctctgggaag

SEQ ID NO: 253 - DNA, 549 bp, Ctenocephalides felis
  misc_feature (4)..(4): n = unknown
  misc_feature (546)..(546): n = unknown
atanattagaaaaatgttagcaagacccttactgccacaaaatccaaaacaagccccttcacattctgaatttgtgatcagtgaccgtgggtatggcaaagattttgtaaaattattacatgttaaacgagatggagaaacacatcatattagagaatttgaagttggaactcatttgaaacttgcttcggatgtagattacctaaagggtgacaatgtcgatatagtagccacagactctcaaaaaaatacagtgtaccttttggctaaccaacatggtgtgaatacccccgaagaatttggcttgttattatgcagacactttttgcacacctacccccatgttctagaatgcagtgccactgtggagatgtacccttgggaaagaattaagggtagtggtcaaccagaaaggcagcataagcatgcttttatttttaacccttcggcagtcagacattgtgtggtacacagaaaaaatacgaactccggcgtcgaagttgtttgaaggatctcgtgtctcaaaacacgcatccgattcctggntcg

SEQ ID NO: 254 - DNA, 549 bp, Ctenocephalides felis
  misc_feature (487)..(487): n = unknown
  misc_feature (513)..(513): n = unknown
  misc_feature (530)..(530): n = unknown
  misc_feature (533)..(533): n = unknown
gaattattatcatttgcattcgctttacttggcttgcataagtacgattgatttggtgctaattcgattcagttttgcatcagtcacagtcaaagtcggtaataaaatatggttactaaagcagtttgcgttttaaacggggaagttaagggaaccatttacttcgatcaaagcggtccagaagcacctgtcacactaacaggatgcgttagtggtttaagcaagggtgatcacggtttccacatccacgaattcggtgacagcacaaatggatgtatttcagccgggccacattttaatccccacggtaaagaccatggaggacctgattctgctatcagacatgtcggcgacttgggaaatcttgtagctgatgccgatggaaacgctaaagtgaaaataaccgacagtcaaatttccttacaaggtctatgagcgttataggcagaacattggtgtcatgctgatcccgatgatcttggcttangtggcatgaacttacaagaccctggnatgctggactcgatggntgngtgtattggattgcaa

SEQ ID NO: 255 - DNA, 502 bp, Ctenocephalides felis
  misc_feature (187)..(187): n = unknown
tgatgtttgttttatgatggatactcattgataccgctaataatcaaattagcttgttgattcagtccagttcagtcgattcatttgtcggcctgtgtgaccttttatttttcgatacattgctacatattaaagattgttaacaatgccagcctacaagttaacttatttccctgtgaaggctctngctgaacctttacgtatgctaatttcttatggaggagaagattttgaagattaccgattcaatcgtgaagattggccttcaatcaaaccaactatgccttttggtcaagtgccagttcttgaatgggatggccgtaaaatgaaccaaagtgttgccttgtgtcgttacctaggaaagaaatacaatcttgcaggaagtactgatcttgagaatcttgaaattgatgctattgtggacacagttcatgattttagagcaaagctagctgcagcacattacgaagcagatgaggcagtaaaaaaaaaaaaaaaaaaa

SEQ ID NO: 256 - DNA, 549 bp, Ctenocephalides felis
gtttaagaagtagtagaaacagatttgttaaagcagttacaaatggcacctattggagaaccagaatatgatcttgtggttatcggaggaggctctggcggattagcttgtgccaaagaagcagtaaatttgggagctaaagtagcagtcttagactatgtagttccttcaccacaaggaacaaaatggggcttgggtggcacatgtgtaaatgtgggatgcatacctaaaaaacttatgcatcaagcatctttacttggagatgctatatttgattcttccttttatggatggaaatttgataatcctgagaacacaaaacatgattggttttcattaacagaagctgttcaaaatcatatcaaaagtgtcaactgggtcactagagtagatctacgagacaagaaaatcgaatatattaatggctaggatactttaaagatcaaaatctattatagctgattaaagaataaaagtgaaaaaatattgctgcaaaaatttgtatcgcagtggaggacggctactatccgatttcctggacactagagt

SEQ ID NO: 257 - DNA, 441 bp, Ctenocephalides felis
  misc_feature (428)..(428): n = unknown
catgcaccactgtggcggtcttgatgtgaatcaaattcactcgttaattcactttgggctccaaaggccctcacagtcgacaagccagctaacgatgccgcaaggtgagaatatgcgggacttcgggttattccttcaagacgtttaatattttttgatgtttttaagtatattcttctcacaaatatgaaaactactccaagaacgccgacagctatcaaaaataatggatttacagttgccgttaatattaaagcgccaactatagtcagtattatctgtgatgaatcaagcagggctttaggtaaaaattcatcaatagcgcccatgtcttttgaaaatctgttcataatccgtcctgaagggtttgtatcaaaaaatcgcatagttgtttgtaaaattcctttgaacatagaatcatgtaatcnttgagaaacccgt

SEQ ID NO: 258 - DNA, 438 bp, Ctenocephalides felis
aaggcgcgataacacagaacgataatgcttaggatatcaataaagtaaaattaacactaataatgtcgattctaatcaatcatcagttcgaaatggacggatccttgtcgatccttgttgccaccacgatagatgatgttcctggcccaggcacgacattccacgttgatcaaacgtcccactgtaggtcttttgaattgaacagcaactaatggactaagataatctcgttggtttctgaatggataataatatccagcaaatcccatgcttggatacatttcaactgggcccaaattttctcgatcaactggattttctccttgacacgaaacccaaatttgttttctctcatccggcttgagactttgtatgtgatccttcaattccataggcatatcttcaggcagcgtcgccacatcatcataataatccggt

SEQ ID NO: 259 - DNA, 323 bp, Ctenocephalides felis
catcgcctgtgactgccacgacttctctgctttcactgacattgctgtcgataatacctttgaccaatgtgtatttgtcagtgggcgaagatcttgccaaaacacgtaatttaggccacactttatccagcagatgttgttggacatcaccgttgctgtctctaatacgcctattgaattcttttccttctaaaatcagaaaatcttcttggggtttcaatattccacatttcgtagcaatagaccttgcagtgtttatattatcaccagttaccatacgaacagttattcctgctttttgacatttacgaatagcatcaggt

SEQ ID NO: 260 - DNA, 475 bp, Ctenocephalides felis
  misc_feature (449)..(449): n = unknown
ggcagctctaggaggatcaatcatagacatgagtccaacaaatctaaggttttcaattgggaagttgggatcatcgctgtcgaatttgaaacctaaggggaatttgtctgtaggcaacatgagatcacaaaagcccaatacacgctctccaagaccgcccaattccagatatgcattattgaaagcttctttcatctcttcatccagtagtttttcctttcctccaatgaagatggtggaacatttttctaagattctttcaggagctcctttcataaccattacatgacgggggtctgacgcatcttcagtttcgtgaatggaaacctggtatttgtttgtggagttaaatggaatttcacagactttcttatttcgttttcgaatagacataacatctcctaaagccagttccatacatttgagaagagcagcttcagatgcatcancactgacttcttttttcaagatgggt

SEQ ID NO: 261 - DNA, 498 bp, Ctenocephalides felis
  misc_feature (479)..(479): n = unknown
acaaaacaaaatttgatcacaagccttgccactttttttgtatcacacagcctgaaaatatgctgatttagatatatgaaagataaatagataatttttttcattcatgataatctgccttttttatatctagaatattatttattaattttgattcggaatatggcttagattttaaacttgtcaccttttttacagttcatgctcaatggctaaacatgttcatgtcttttagattatttttttacatgcttattcagactttctattataacatgcgtcacaaacccttttaggttcatgccaatcccgttctggaacaggccttcttttcaaagagcatttgttgcaaacagcttgaccgcaagcacgacaatggtgccttctttgatatgttaaaaacgtccgttgctggtctgatgttgcagccatcattgggcctgttgtatttaaatcactattaatgcttgtagtagtanaattacattcagaatcgga

SEQ ID NO: 262 - DNA, 279 bp, Ctenocephalides felis
ttcaagctattgcaattactttgtgtgttgttattggtataacactctttacattacaaaacaaactggatttatcaatgcttccagcagcattgtttactggactttgctgtttattggtaggtggtatcattcagatattcactcattcaaccatttttgaattagtgttatgcagttttggtgcactaatattcagcttgtttttgctttatgacacgcatgttatgatgacgacattatcaccagaagagtatattttggccacaattaacttgt

SEQ ID NO: 263 - DNA, 344 bp, Ctenocephalides felis
aacctaaaaataagcaatttacatacaagatcgacacaagtcatgcaacgggaaatattttaagaacttataaccgaaaaagtagtgggttgcgaaataggccactgtgggcactcaccatttgccctgtattcgtcctggactttgtagaattctgctaattccttacccgagcacaaaggagtatcgacttgggtagtttcgttaaatctcgaataatcgacttcgtagcattgtctttctttattgtagttgacgactgggtcgaacctgtggccccacaatatttccgtattaatgtaacttgatcgagcttgtgtggtctgtcctgtagattcaatagt

SEQ ID NO: 264 - DNA, 477 bp, Ctenocephalides felis
attaatttaagaatctaatggacatcttttgttcaacatctgtgcgttccaaagctttacaaaaatcatcaaatgagatcatttggtcaccattttgatcagcttctagaatagttctttcggcaatgcttgacaattgttcttcacttatatttgcacccaccatcatgtgtaaaatggcaagaagttcatcccgagatatcatgtcatcattgtccaagtcatacattttgaatgcaaatctcaatttttcttccctgctgttcaatttattttcccgattcttcttaatgggtctgaaatgtgctaagacttgcataaactgtaagaaattcaccctgtcatcatgactttgagcaaaaaatgcatggacaatcctatcacctaagggatttattgcgagttcgggtattctcaaaaaatcatctcgtgaaagagttccacagtctccacgatctagagatgtgaatcttgagt

SEQ ID NO: 265 - DNA, 377 bp, Ctenocephalides felis
  misc_feature (2)..(2): n = unknown
  misc_feature (72)..(72): n = unknown
  misc_feature (82)..(82): n = unknown
  misc_feature (135)..(135): n = unknown
  misc_feature (137)..(137): n = unknown
  misc_feature (144)..(144): n = unknown
cnaactttgtcctgttatcccatcgatcatgcgtctagcattggctatggctagatttaagtccctcctcanaacaaatccnacaagatactgagattctctggaaacaacaactggatatccattgtgctcagntnctttcantaaaccttcaacatcatccacagtcatcgagtcttgagtgattacacttaatgtttcattcctcttgggttgcatgacatctgcagctaaagatgtatgtgcaaattcatctttactgccaagaatggatatccattaagctgtatatgggcatcatatataccctgtctgccaaagcatcaccaacccatttggaagccatagctgctgccattaagggcacgatataacgt

SEQ ID NO: 266 - DNA, 222 bp, Ctenocephalides felis
tttctttagtggtgcactgtagatatccactttgatcagcgcacacttgatctgggctacaggattccttaaccggatctgctcctatttccggacaatactgcatttcgggtgaactgcacgaattcacgcaactaaattttacttttttacatttttgctcgggtttcggtacaaaatgctatacagttacatgtcctgcacagcctaaggtgcttccgt

SEQ ID NO: 267 - DNA, 209 bp, Ctenocephalides felis
  misc_feature (2)..(2): n = unknown
  misc_feature (10)..(10): n = unknown
  misc_feature (32)..(32): n = unknown
  misc_feature (45)..(45): n = unknown
  misc_feature (118)..(118): n = unknown
  misc_feature (121)..(121): n = unknown
  misc_feature (129)..(129): n = unknown
  misc_feature (174)..(174): n = unknown
cnaaagaggnttcaggaagctcttcttcgtcncctgattttggancccgagttggttcaaccaattcaccaggatcgtgaatctaatgaacatgaagaacaattcaacaagcaccatnatnacaagcancacaaagctgattatatgaatcacatgagagtcaccgacacttcngcaatcatggctggttcttttgctgtgatagcggt

SEQ ID NO: 268 - DNA, 178 bp, Ctenocephalides felis
  misc_feature (96)..(96): n = unknown
aaccaactagagctaagaaaaaagccagcgatagcatagaactgctatgttcccctccaaataccactgttgttttatcatataaaaatgccatangtatggagctaatgcatccaatcaccatcaatatatatatatatatgaagagtcttttatccttcctgggtaaagtttctgt

SEQ ID NO: 269 - DNA, 238 bp, Ctenocephalides felis
tttgttttactttatgtgttatataaaaaaatattatggttgaacacaggctcgcaaatatgataaggcatttaagaattttacaatttagatttttttaaatccatgaatatatttgttctaatcaaaattattcattttacgcttaattttattggttgaactaatagatagatagataaaagatatagagttaatataaaaatgaagaaaaaaaaaaaaaaaaaaaaaaaaaaaa

SEQ ID NO: 270 - DNA, 326 bp, Ctenocephalides felis
  misc_feature (240)..(240): n = unknown
cgcaaggtatggcatatgctttgttagcaaatgttattccaacagcaggattatatgtggctttctttcctgcattggtttatgtagtttttgggtcatccagacatgtatccatgggaacatttgctgtagttagtataatggtaggaaaaattgttcaagaatacgcctattttccagacggtgtagagaaaaatacaggagatacgaccacaattcctgaccctgatgtgcaatacnatcctacagaagtggcaaccgcagttacatttctggctggaatttatctgcttatcatgtggatttttcgtctaggggctcttagt

SEQ ID NO: 271 - DNA, 549 bp, Ctenocephalides felis
  misc_feature (500)..(500): n = unknown
  misc_feature (529)..(529): n = unknown
  misc_feature (535)..(535): n = unknown
tcgcaagaaatgttcactctaggaatatgtaatatatttggcagtttcgtgaagtcgatcccaacttgtggtgctttcaccagatcagcagtcagcaatgcaagtggtgttcgctctccaatggcaggcttgtactcaggtactatgacgcttttagcgttaagttttctcactccatacttttactatattccgagagcaactctttcatcagtgttgatatgtgctgttatgttcatgtttgattggcaaatagtgatgccaatgtggcggactaataaattggacgtgttatttatggggtgtacatttgctgcatctttatataaaggagtagaatttggcttaagtgttggtgtaattctgactttatgtcctttgctctatttgtgggcaaggcccgaaattaatcacatatctaagtggacacccgaaggtcttgaatatcgcgtgtatgcccagaccaggtctttactttccttcggttgactttttgaaangagaattgccaaagttctttaaattttcnggtccntgatttagactgtc

SEQ ID NO: 272 - DNA, 549 bp, Ctenocephalides felis
  misc_feature (3)..(3): n = unknown
  misc_feature (538)..(538): n = unknown
  misc_feature (548)..(548): n = unknown
gtnttttccattgagtagcgaatttgcccgtcttacaatattaaacgtgaattcgttttgccgggtcgtagtaaccaatttaatataatggctcctccaccatacgcagacttgggaaaacaagctagggaggtatttaacagtggctatcattttggtcttttcaaattgaatttgaaaactaaaactgcctctggggttgaattcacttcaggaggaacttctgaacatgaaactggcaaggtatttggatctttggagacaaaatacaaagtaagtgattacggtctcactttttctgaaaaatggaacacagacaatactttagctacagaagtttccatacaagatcaaatagctaaaggtttgaaagtatcattcgactgctctttcgcaccacaaacgggaagcaaaactggtgttttgaaaactgcttcttacatgatagtgttgcagtaaatgctgatgtaaatttgaattatcaggacctttgatcaatgccagcgcagtagtggttatcaaggtggtggccggtatnaactgatttnc

SEQ ID NO: 273 - DNA, 549 bp, Ctenocephalides felis
ggcaaaaggatctgccaaacctgcaagccggcaagaaagatagttcgaaacgatccaattccagcgatgaagcgacgcatgtaaatcataccggggaatgggcgaggccgcgcagcgagtcggcgggcgaccctgacgacggctgcgggaacacgaccgactcgggaggaacgtacgtcaaacgcacggggttagcgttatttctgtggtacgcctcatgcggaggagttcgcgagtggtgcgtagcttggtggcactcaggcagagaggaatactatgaaccagatccggaagaaccgtcagatcctggatacgcgactccggtctctatcgagacgccgttgcagagctcagtgtcgagatgcacttccctgaatgtgatacgcgacccatacatgacgacaacggaagggcgaacctcgcgctgccgccgacttacctcttcacgcctcgtcgcgcaactactcaagattcggtttacaccatctgatcaggctcccggggaccagacaaagacggacaagatcgcacccttcataaaatgatatc

SEQ ID NO: 274 - DNA, 549 bp, Ctenocephalides felis
  misc_feature (514)..(514): n = unknown
ggctcttggtcgaagaggctgttaacgatgataacagtgtggtggctttgtctcaagctaaaatggacgaactgcagctattcagaggcgatacagtattattaaaaggcaaacgcaggaaggagacagtttgcatcgttctctctgatgatacttgccccgatgaaaaaatccgtatgaacagagttgtacgtaacaacttgcgtgtccgcttgtctgatgttgtttctgtgcagccttgtccagacgtgaagtatggaaagcgaattcatgtgctgcccattgatgattctgttgaaggcctaacaggaaatctgttcgaggtctacctcaagccctacttcttagaagcctatcggccaattcacaaggacgacacatttattgtccgtggcggtatgagagcaatagaattcaaagtagtcgaaacagatctgcttcttattgatcgtggtcctgcacagtcattcattgcgaaggggatccaatcaagcgtgaggaagagaagagctcnatgctgcggtatgatgatattgtggtgagaaacat

SEQ ID NO: 275 - DNA, 549 bp, Ctenocephalides felis
ttgacaagtttcgatttggttagttcttgtacttaatatggaatcaatctcatctgaactgactgaaccacaaacaaattctaattcatttaccgttgatcaaatagaaattgacatattgcccactatatatgatatcatacgaagtgttgaaagagatccacatgatagcgctggcaaaaccagagaatcacaagattgcagtgtgaaggtattagacttacaaaagaagttagaaaaaattcgaagtcaagttactcagctacctggaattgattataataaagaggaacaacttcaatatttagaaacacttaggaaacaattaaaacttaagcaagagcttttgcacaaatacaggactatgtacacatttgattcaatgaaaatataaattgtttaaaatgcctctgcgatctctcatgaattatttgctgaataacgacgtttagttcagaagttgctgaatcttatccagtcgaagagctggcagttagccatttcgctatgatagatcaaaatcaatttagggacacactgagaagctgg

SEQ ID NO: 276 - DNA, 549 bp, Ctenocephalides felis
  misc_feature (490)..(490): n = unknown
ggctcgatatcgctggaaaaactttattatcgatgtgatttatcaatggtttcgtgagaatattctatttgctttgacgaaaacaaaaaactgattagtttattaaataaatagtatatgttaatatttgctgattggcgatgacggcagagaaagcggacttttccgacagtcttctgagtcggacgggagagcaggtccacagaccaacatttcgctctcatgccaaagactgtgctagtgcttgttgcaccagaaaaaccttagaaaggcatctgcctatagtaaattggttaccgaaatacacctgggaaaaattaggcagagatgccattgcaggtttgacagtaggtttgacagcaataccacaaggtattgcatatgctgtagttgcaggactagaacctcagtatggtttatatgctggtttcatgggatgttcgtgtacatattcctaggaggatgcaaagatgtgacataggcccacggncatatggctctatggtgcacgctatgtcaagactgggcctgatttgcaatctgcccttt

SEQ ID NO: 277 - DNA, 549 bp, Ctenocephalides felis
  misc_feature (537)..(537): n = unknown
aaagtgatgcaacaattattttcaaaatacaaaagtgttaaaaaatgggcgttaaaaatatatatttatactgcattctgatatgcctgctacattatgcatcttataccaaaactgaatctattaccaacaattctttggaagaattgtacacaaacacttctgccaaaacagattccattactcttttatcaaaaaccagtctaccgcctgatcaaaatgccacgattgaaaatcctgatccagtgcttcctgaaaagggctccgctgaacaagaacaacacagctcgatgtctatattcttcgtgctttgtgtgctggctttagggattcttttaattcatttcatgttacaaacagggtttcagtatttacctgaaagtattgttgtagttttcttaggtgctttaatcggcttgataattaatttaatgtcgtctaaaaatattgcaaattggagaatgaagaaccttttcacccacagcgttttcttagtgctctccgctataatattgaatccggtatattgcataaggnattttttcaaat

SEQ ID NO: 278 - DNA, 549 bp, Ctenocephalides felis
  misc_feature (444)..(444): n = unknown
  misc_feature (477)..(477): n = unknown
  misc_feature (483)..(483): n = unknown
  misc_feature (527)..(527): n = unknown
  misc_feature (541)..(541): n = unknown
cttgcttagaaaaccatacggaagaaccaaacctctcatatctcgtaccatgatgaaaaatatacttgggcaatctgtatatcaactaacagttatattcacactgctttttgttggtgataagctcttagacattgactcaggaagaggagcagactacggttcattgccaactcaacattttacagtaatttttaatgcttttgtactaatgactttatttaatgaatttaatgctcgtaagattcatggacagcgtaatgtttttgaaggcatttttacaaatccaattttttacactatttgggtaggaaccgctgttgcacatgttgtcattgtacaatacggagatctggcattttcaacaaaagggctgaatctcgagcaatggcttggtgctgttttcggcttggtcactattatggggacaaattgtacccagtnctacaagaaagattcctaaaattcttcgtagtntacttnttatttgatacacttcaatgcaagaataactagtttagttctantcataagaatgcanatttagtg

SEQ ID NO: 279 - DNA, 549 bp, Ctenocephalides felis
  misc_feature (441)..(441): n = unknown
  misc_feature (544)..(544): n = unknown
  misc_feature (547)..(547): n = unknown
aattcttgtgtgtagaataaaaaacatatttgaaacgttcatataataaaaagtgcaacatgtcagatgaaatgcaagaaaacggaactattaatggtgaagtgccagaaattgaacttatcattaaggcatccaccatagatggtcgacgtaaaggagcttgtttattttgtcaagaatattttatggatttgtacctgctagcagaacttaaaactatcagtttaaaggttacaacagtagacatgcaaaaacctccaccggatttccgtacaaattttgaagcgacgccgccgccaattctaatcgacaatggcctgccgtgctagaaaacgacaaaatcgaacgtcacatcatgaagagtgtccctggaggacacaatctttttgttcaggataaagaagtggcaacactcatcgagaatttgtctctaaattgaantggtttagtcaaaaaggatgcgtaaaaagcaatagtctgtgacccctgaggaaaatcaacgccatttgggcggcgcggacgagattctacggcgacccatgtntgntc

SEQ ID NO: 280 - DNA, 269 bp, Ctenocephalides felis
agatctactaatgccgcgtttaccactgtcacagcaattccgcaaaccagcaaccacaaatataaatatgatgctattgttaaatgttcaataaatgcacaaattattccacaaatcccgcatgagaccatcacgaatacaagaattggaagctttcccacagagttaataatagcacctattatgggaaatccaatcgcatatccagcttccaacattaaagaatgcataaatgcctgttcttccattgtgtctttacactcggtcgt

SEQ ID NO: 281 - DNA, 489 bp, Ctenocephalides felis
catcaaatattgaaaggaatcgatcatgttcaaatgcctggaaaagttagcagaaaagcccaagagttgattagaaaactctgtagacctgcacctgcggagagactaggatatcaaaaaaatggattgcaggatgttaaaaaccattcatggtattcatcagtttcattcgactgggtgagtctcaaatctcaagaaatgcctgcgccactggtccgcacagtagaaaattcaacagatatgagaaactttgacaaattcccgaagaacagagaatttccacctgatgaattatcaggtttcgatataaacttttaaaaacactaatttgcacacctgataatgttacataaaatctacgtggctgcagcgctgatataagtaattggtattataaatacagatgtcattcttgaatataagaaattatttatatatttgtaacgataatattgaaataaattgttttatatttcgataatataaaaa

SEQ ID NO: 282 - DNA, 498 bp, Ctenocephalides felis
  misc_feature (25)..(25): n = unknown
  misc_feature (82)..(82): n = unknown
  misc_feature (130)..(130): n = unknown
  misc_feature (322)..(322): n = unknown
  misc_feature (386)..(386): n = unknown
  misc_feature (392)..(392): n = unknown
  misc_feature (423)..(423): n = unknown
  misc_feature (434)..(434): n = unknown
  misc_feature (438)..(440): n = unknown
  misc_feature (443)..(443): n = unknown
  misc_feature (456)..(456): n = unknown
  misc_feature (478)..(478): n = unknown
  misc_feature (486)..(486): n = unknown
aacatgccctcagcgatttccttanaaatacgatacattaatgatttatctaaatgatcaagtcccttgagatagtttaaangacttcctccttttacgtaacttgtaatcgtccaaatttcttcagaantggtggatataccgaaaaaacatgacaaacgatgatgatctagtgttttcatgatcatagcttccgatttaattatatctaatgaattcacacgataaatgcttattttatgaactgtcacatcgattttcttctttttccatagtgcttgcgaaacaggattataagatcctctactcaagttagacttanactcaatatcttcaactggtataattatttcatcaccatgactattataatcgtcctgcttagngcaaangatttgtcaatttaatgcccactgtatccancgggttatgtntgtnnnttncacacaagcgcangcatactggggaaaactatgtngaattcantagagtaccgtc

SEQ ID NO: 283 - DNA, 498 bp, Ctenocephalides felis
atctttagcaccaacattcgattccaaccacaattgattaagaccgcaatcactcaaatccaaccagttgagaagactgagaggaaggaatactttagcttcaacggtcttcaatggattgcctgataacaaaagtttgtttaaacttttactatttttaaatattctagtatcgagtttgttgattttattattactcaaatctaagctgattaaattgcgcatatgccagaaaatattatattttaaatctttgatcgagttctgagctaaattcagttgagccatggaaggcatttcagcaaatgtatgtttgtctaagctaagtaatccgcaatttactgcttcaaacatataagtggtaaacgatgacaaatttgaatgaaatctaggcaaattcatgagattcgggttgttagaaattttaataacatccaaatgatcattattttggaagacgttgtcaggtaagaaagtaagtagattatgtgtcaagtc

SEQ ID NO: 284 - DNA, 129 bp, Ctenocephalides felis
atcgatctttggcggctaaacatatcttgctgagcgaagccggccgtatagaaatatgtggctttaaggaaatgagagttcttcctgagggccaaaattatataaaagaaaatctcgacaatcctaagt

SEQ ID NO: 285 - DNA, 424 bp, Ctenocephalides felis
gtaaacatccatacatttagggcagtaggattttaccatagcctctccaggcacatcagaaagacctaatggcagcataggctgactatcgcagtaaactctagggcaatatccgaagtctccagattggtatttttctatcatttgagctatacctctatttgttaaaatatatctggcgtgaattagaccatataacatctctgcagcttgttctattgcatctgactgatttggattatcatctatttcatcatcaggtttaaatctaatatcatatccaaggcttgtctatatcgtggaatttgctcattaaggcctgttagattgaatttatcctgtatatagtcttcatccacctcgcaaaagaattcatttcctcgtagaccacaaaaccaagatatccatgagacctcctcagaac

SEQ ID NO: 286 - DNA, 204 bp, Ctenocephalides felis
ggacggccgactcgtccgaattatgctcggcacgtgttcgattcaaatgatcccgctacgttcgacatccaaatgataaacactatctaatcaagtgatgttgtttaattaagcaagtgttagttcgaattcatttttgtgttttgtgtatattataataaatggaccccgaaattcctctgaaaggtgtgactccgggtttgt

SEQ ID NO: 287 - DNA, 446 bp, Ctenocephalides felis
  misc_feature (387)..(387): n = unknown
acacgcacgagcactataatcactttgaaacttcatacaccgattgatgtcatgtcgatgtgtggtaaatgtcatgacagatcacagtagcagcaggaaggttataggttgctcagattgtatcctggttcttgacacatgtattactgatgtttcacttggttttctgtggcaattgatggtgggttacggctgtcgttacagcattctgcaactgtggtcctgatgagcttgaggactctatctgctttcggtgacttatttccaaatctgctaaacgtttccataattcatctcgttcgcgctcgcgtttcttttctttctgcgttctcctttataacttgcagtcaattcatcaaatagtttactattcatttccatgaatgnttttaagacattataaactaaagcacaattgctgattccaagctcttttgaaatgcggt

SEQ ID NO: 288 - DNA, 268 bp, Ctenocephalides felis
ccacaggaaaggaggtagctatcaaaattattgacaaaacacagctcaatcctggttcgcttcaaaaacttttccgagaggtgcgcatcatgaaaatgttggatcacccaaatattgtaaaactgtttcaagtgattgagacagaaaaaactttatatctagtaatggaatatgcatcaggtggtgaagtgtttgattatcttgttcttcatggtaggatgaaagaaaaggaagctagagccaaatttaggcaaattgttagcgctgt

SEQ ID NO: 289 - DNA, 465 bp, Ctenocephalides felis
cggcaaatgtccaagcttttttgcctggatccacacgtttggcaaatccaaagtcgaccagtttgatgtatcctttagtatctagcatgagattttcaggttttaaatcacggaagatcatatttttgtcgtgtaaatattcgaaagcttcaataacacaagcggttataaatctagaagttttttcatcaaaacattttgctttatgcaacgccgtccagacatcacctcccagacatgcttccattaggaaatacaagtatttggtatctttatatgtgttgtataatctgcatataaatgggctgtcacaactagccataacatgcttctcattgtaaacgtgctgctgttgttgctgctgaacaatatcaactttctggagacattttagagcaaatgtcttgtctggtgtggatggatgactgacccagttccacgcgaccaaatccgcaacgcccaaag

SEQ ID NO: 290 - DNA, 294 bp, Ctenocephalides felis
ctatattctggctttctaaatactccatgccgtcaataatctgccgacaatatgtagggaaaagttcttcgtctataataatattctctttctctcttaaataatgcaacaaaatgtagtctagtttttcagtaatgatgtaatgttttggagtttcgatccaggcaagaacttgctgtatatttggatgtttcagtgatttacttaaatttatctctcttttaaaattttcatgttcttgactttccacgccatctattgtggttgttaccaagagtggctttctcgaaatgt

SEQ ID NO: 291 - DNA, 203 bp, Ctenocephalides felis
gaaaagcagcaggatttgttgttttccgacgactgtctgacacaattcaatatctactactacaagcttcttacgcaaattttcattggagtccaccaaaaggccatttaaaacgcaacgaaaatgaatttgatgcggcacttcgagaaacattagaggaaacaggtctttgcaaaagcgatattaaaatatttaaagattgt

SEQ ID NO: 292 - DNA, 283 bp, Ctenocephalides felis
catcactgagaagaactcttcggctacggaatatcttcattggaggcgcgttgttggtgcacgcagcattaacaaggttcttgcaattcagcataatgaccagaagaaaaatacaggtactgcttttcattttgattcagtaatagattacttcttgagatagataataatactgtggagaagtaaccttcacatgaaataggcttgggtcttataattactggctttgttctggatattagaaatctgatcacaaaattttattaagttattattatgttaa

SEQ ID NO: 293 - DNA, 500 bp, Ctenocephalides felis
  misc_feature (3)..(4): n = unknown
  misc_feature (12)..(13): n = unknown
  misc_feature (16)..(16): n = unknown
  misc_feature (21)..(21): n = unknown
  misc_feature (23)..(24): n = unknown
  misc_feature (32)..(32): n = unknown
  misc_feature (38)..(38): n = unknown
  misc_feature (41)..(42): n = unknown
  misc_feature (74)..(74): n = unknown
  misc_feature (134)..(134): n = unknown
  misc_feature (136)..(136): n = unknown
  misc_feature (144)..(144): n = unknown
  misc_feature (183)..(183): n = unknown
  misc_feature (190)..(190): n = unknown
  misc_feature (192)..(192): n = unknown
  misc_feature (232)..(232): n = unknown
  misc_feature (238)..(238): n = unknown
  misc_feature (272)..(272): n = unknown
  misc_feature (290)..(290): n = unknown
  misc_feature (320)..(320): n = unknown
  misc_feature (333)..(333): n = unknown
  misc_feature (390)..(390): n = unknown
  misc_feature (455)..(455): n = unknown
agnnttgcgtannaanccctnannaagcttcntcgagngcnngaattcggcttagcgtggtcgcgggccggggnacaagtatcaaacatgggctacgggggacccgtagattcccaacattctacaaggggcgncnttctttantaaaatatcatccagattttcaaaacgaccgatggattngcccggntnaaaaccaggcacacctggaactaacgctttagttagcggnggaggnggcacaatgcaggatgaccaggtcaaaccgaggnccttgagggtcacatggnccatgaagaccacaagcagtagggaccccnatgagataatgtntgaaattcgaaaagttttggatgccaatggatgcgattatgaacaacgtgaaagggntttactactttgtgtcacggagatctatcacggatagtttagtacaatgggaaatagaagtctgnaaattggcaaactttccttggatggaggtcgattcaaacgcattt

SEQ ID NO: 294 - DNA, 302 bp, Ctenocephalides felis
actgtcatcatcgcttaactccagtaatatattatctgatttcagatctctatgtgcaattccataagctgataaatgggcaatcgcttccaaaagttgagcaaacaaaattatggacgtcctcattgatattttattactactaagataatcatgaagactgcaatcgtatctcttcattaacaaaaacaatgacatatttctaccataaccatcactgttaattctttgtggtaaagctgatggaaacaaactggctgctagtggtaaaccagttggaattctatcagcaaacacgctgt

SEQ ID NO: 295 - DNA, 498 bp, Ctenocephalides felis
  misc_feature (58)..(58): n = unknown
  misc_feature (68)..(68): n = unknown
  misc_feature (77)..(77): n = unknown
  misc_feature (104)..(104): n = unknown
  misc_feature (220)..(220): n = unknown
  misc_feature (455)..(455): n = unknown
  misc_feature (489)..(489): n = unknown
aagctttctttttttttttttttttttttttttaaatcggtccaaaaccatcattggnttattcattngtagaaatngagatgttaaaattgactccaatcctnttaataatatcggctgctaccctacttccaaattctgaacaagtttgtaaagtattgtcctgcaagaatttatataagaagccagcgaggaatgcatcacctgcacctgttgtatnttttataagcgccgatggaattttctcgatttcaacagaccattttgcaaatcttttcatcttgttggtaaaatatggtaactggttttgaagcatcagttgctacaactatcttacttttgaagctagtgcatttcttctttagaggcttgtaaactttaatcaaatgctccataacactatccaagttattgaaattataagccttgcctaattctaaaaattgctcagcggnttccaaagactacatctgcagattctgctagcgnttttacatt

SEQ ID NO: 296 - DNA, 227 bp, Ctenocephalides felis
cactacctattgatcctgctatgtttccaacgtggcctgcaaaaagtgaacttggaacaagacgtgcacttgccagtagtcctaaaccaccttcaggaggtgaccagtttaaaacattgggggaaggtgaaggagccgatgcgtattggggtgaacgagcatctttgttggatacaagaaacattccaatgggtgcaggcttctcactcaagttttaataaattcgt

SEQ ID NO: 297 - DNA, 452 bp, Ctenocephalides felis
ggcacgaatatttgtcttcataatcattacccgctcttgtatattgagttttagggatcaacttcttcacataattctcatttataaaacgttggaacaaaactccaaatgttgttttcgctttcgaatgtcgaaatagtgcataaaattcatcgaagtccaaaaaccgtgaatgattagagtcacccaaactcataagatactgagtcgcagattctggaaactcattattatattcacttctctctacaattctttgtaattctctgacagatatcaagttatcattatctgtgtcatactttcaaaatacaattaattattgttaacgtgcatacataaactttgatttattataattttaccttcccgaataggtatctgatatattgatcagtttccctcaacggtatattatattccatctctaattgtgatatccttctctgagt

SEQ ID NO: 298 - DNA, 138 bp, Ctenocephalides felis
ttagatacaagtatttctgatgatcttaggaagtatagaacctactctggaagtaatgttagagatttattaagagctataaggaataagaagcatcattatcatcaactctcacctgatgcattgaaagttttgggt

SEQ ID NO: 299 - DNA, 498 bp, Ctenocephalides felis
  misc_feature (470)..(470): n = unknown
aatcattctctctgatatgtgtatcaaaatggcgctatcaactggccaaattgatgtccttcacaatctgcacaaaattagagaacaaagggccaacttggtggacaacactaatcaattcaaaatagttcatatgcttgttttggaatgcttatttggagagtctacaagtattccatgtgaacatttgctaaaaactgtagccgaaatgaaaagtcgtaatgaaatgttcaaaatgtggaaaaaaatagacgatgtcgcatggaaagatgacttcgttaaaggaatagacagtgaaccatctcaagaagatattgcgagaaaagagaatagaaataaaattgtgccaggaagacgaggtcgtgtatttttgtcaagatttccattgacaaaagcagattcggattatataaatgcaatatttgtagatggatttcaaacaaaacgtcaatttatcggtacgcattttnctttacatcatacagttgctgatttctg

SEQ ID NO: 300 - DNA, 549 bp, Ctenocephalides felis
  misc_feature (4)..(4): n = unknown
  misc_feature (28)..(28): n = unknown
  misc_feature (40)..(40): n = unknown
  misc_feature (52)..(52): n = unknown
  misc_feature (112)..(112): n = unknown
  misc_feature (202)..(202): n = unknown
  misc_feature (215)..(215): n = unknown
  misc_feature (384)..(384): n = unknown
  misc_feature (387)..(387): n = unknown
  misc_feature (418)..(418): n = unknown
  misc_feature (437)..(437): n = unknown
  misc_feature (490)..(490): n = unknown
  misc_feature (500)..(500): n = unknown
  misc_feature (513)..(513): n = unknown
  misc_feature (527)..(527): n = unknown
  misc_feature (545)..(545): n = unknown
cttntgtttaaatattgtattttattanattattcgttgntattaacgctgngactatagataatatttttaacaatttataattcaatgggtgttagaactgcatgcaggntatttaattaagaatgggcgcttatttatccaagcctgttgtggaaaagcattcgagcgatgaatcgaataacatattaacttgtgcagntagtagcatgcanggatggagaataactcaagaggatgcacataacctgatattaaactttgacaaggatacatcactctttgctgtttatgatgggcatgggggtgccgaagtggctaaatactgtgctgaaaagttgcctgattccatcaaggaaactcaagcttataaaaatggggatntancacaaggtcttaaagatgctttccttagttntgatgctccattgcagaanaaaaagtcattgaaatactcaaaaattatccactttgataatgacattaacangcaagtcagntgaatggactgangatgacggtattanatgatcctcagaatctgngaag

SEQ ID NO: 301 - DNA, 547 bp, Ctenocephalides felis
agtttctacttttgacatcttcattcattgtgccgacaaaatgttgtaaaatgctgttttataagtgaattttatacgaataacttagaattatattttattttattgagtgcatgtgtgtgttcgagaagtctcaaaggtcaatttgataaaagtacaagagtacctgcaagatttttgtaaagaaattatataataagtgttttattaatatattttatacaatggctttgaacaaattgagtatcgagagtgtggatttggaaggcaagaaagttcttatgagggttgatttcaacgttccgttaaaaaacggtgttatcacgaacaatcaaagaatagtggcagctttggatacgattaagtcgctttgaataaaaatgctttgagtgttattctgatgagccatttaggacgtcctgatggcttctaaaaaggaatacagtttgagacctgtgcgaggaattgaagaactattaaacagggatgtgcatttttggaagactgtgtgccccaaagtagacaagagtgcataatgcaagcaagg

SEQ ID NO: 302 - DNA, 549 bp, Ctenocephalides felis
  misc_feature (5)..(5): n = unknown
  misc_feature (511)..(511): n = unknown
aagcnggtaccaatgccgaaattgaattaaaacgcggcgaaaccatcaaactgaccaccgacagagcctattccgaacgatgcaccgatcaaattttatacttggattatgaaaacattgttagagtggttaaaccaggaacaaggattttcatcgatgatggcttaattagtgtcatagtgcaaagtgtagcaacaaataccttgatttgccaaattgaaaatggtggccttctaggaagccgtaaaggtgtcaatctaccaggagttgaagtcgatttaccagcactctccgaaaaagacaagcaagaccttcgttttggaattgagcacgacgttgatatgatttttgcttctttcattcgagatgccaacgctttagatgaaatcagagcagtattaggagaaagaggacgccgaattaaagttatctctaaaatagaaaacaaacaaggagtagctaatgcagatgagatcattagggcttccgatggttcatggtgccgaggtgnttgggaatagaaatccgcagagaaattgtcttgacaaa

SEQ ID NO: 303 - DNA, 547 bp, Ctenocephalides felis
aatataataatgatggtatacgtttgataggttctactgctcagtttttaatacagtattatattatcgaattctcataatttcatctaattttgagctggatagagtgctgattgaaatatccaaatttcagccttgtcacaatcagaatgactgataatagcgatttagatagacaaattgaacaattaaaaagatgtgagattattaaagaagctgaagtaaaggctctttgtgctaaagccagagaaattttggtagaagaaagcaatgttcaacgagttgattcacccgtcacagtttgtggggatattcatggacagttctatgatttgaaggagcttttcaaagtgggtggtgatgttcccgaaacaaactatttgtttatgggtgattttgtggatagaggattttacagtgtggaaacatttttattgttgttagctttaaaagttcgatatcctgatcgaattcattaataagaggaaatcatgaatcaagacaatacacaagtatatggatttatgatgaatgcttagaaatatgg

SEQ ID NO: 304 - DNA, 549 bp, Ctenocephalides felis
  misc_feature (4)..(4): n = unknown
aaanaattgatcccaatggagatccatcacattatgatataagatctgatgtctggtcacttggtatttctttattggaattggcaactggtagatttccttacaatacatggggaacaccttttgaacaactaaaacaggttgtgaaagatgatcctcctcgtttaccagccggtgtatatagtgaacaatttgaaaacttgatagaacaatgtttacaaaaacaatttgaacgtagacccaattatcaacagttattgcagcatgaattttgtgtgacccatcgagataaaccaacagatgttgcatcatttgtgaaagatatactaacgtttgatacagtacaataaatttgttcttactaatatttagtattaaactaataaattataataatgtagttaacataacttgttgctgttagattttttgaagttataatcctgaaacttgcaagatttgtttcaaatgtaaaattatatataaaatcatatttaacatcatttacatcatatacatgatattttgttaaataaacctcaattctcg

SEQ ID NO: 305 - DNA, 549 bp, Ctenocephalides felis
  misc_feature (516)..(516): n = unknown
aactcacgcaactccagccgcgctctacgcgagaagcgttcaccgggattgggaatgcgatgtgtccgtgcccgaaaatttcagggagatgagcggcttaaaggacatcgccaggcaacttgtgcaagaagcaccaggcaataaattgaacgtaattttggcgggtggaagcgacatgatgggcagcagccgcaacccggagtcggcgtgccaacgcggagatggacaagatttggtagcagaatggcttcattcgaggactagcttgaactcccagggcgtctatgttaatacgactggtggacttgaaaaggcgaaagtgaatgagatcgattacttgatgggtatatttgcagcagatcatttgccctacaatgcagtgagggataagggtcctaatggaactccgtctttagcaaggatgaccaaacaagcattaggaatattacaaaggccagataaaggattcgtttaatggtgaaggaggcgtattgatcacgccatcataaaattttnacaattagctcttgcgaactgctgaatttgcga

SEQ ID NO: 306 - DNA, 549 bp, Ctenocephalides felis
  misc_feature (519)..(519): n = unknown
gaaaaatagaacattatcgacgtttaaatttctccaaaattgttaggttatgcaaaaactttgtccacaaagactctgctactacaccagagattgataccattttctcaaatggacgcaatttaactatatcaactggcaaatacgctcgattttgcgatggatcagctgttgccaaaattggtgatacttcagttatggttacggctgtgtcaaaaccaaagtctcataatgttgggaattttcttccacttgttgttgattacaaacaaaaatcagctgcggcaggacgcattcctacgaatttcttaagaagagaactaggtccaacagaaactgatatattaacatccaggttaatagatagatgcctcaggccattatttccacctaactatctcaatgaaacccaattagtttgtaattcgttagccgtgattcaatatacaatgctgatgtgccagctattaatgctgttcagctgtttgcgtaagtgattaccatggaatggccaattgngctgtaggatcggttaaaagattcgactga

SEQ ID NO: 307 - DNA, 550 bp, Ctenocephalides felis
  misc_feature (495)..(495): n = unknown
ctcagttttagttcaacagcaggcgaagttatcgtttccggagcagaagacggtaaatatcgtgtttggaacttgcaaggccgacaactgtatgggggcaatgcacaccatcaagccgccgtgacttctcttgcttgggctccatccggagcttattttgctctcggctcttacaacggaattcgcctgtgcgacagcgctgggtggtcgcatgctttgaataaagccgaaactggttctctgtacagcattgcatggtcacaagacggaactcgtattgcagcagcatgtgccaatggacatgttttattcggaaatattatagaaaaggaattgtgcaaatacagctataacattgttctaactacagctagtactttgtcagtgagcagtataattgatacaacaataaatgaagtgcttgaatttacagatcgagtaacaaattttgatataaactctgagcatctgtggtcactacaccaactcaatgcntatatataaaattgacgatttattcacccacagtgttgagttgaaggatggtgta

SEQ ID NO: 308 - DNA, 549 bp, Ctenocephalides felis
  misc_feature (497)..(497): n = unknown
  misc_feature (500)..(500): n = unknown
aaaatctttcatcatgtagcgtataggagaaatttatttgcctaaaatctgcgttattgatctttggcttactaatcaaaagtgatcgacttctttcttgtagttttgtagtagtgtttaaatcatttgttaataatggaaattgtgggtgatttcgagtataacagcaaggatttaataggacatggagccttcgctgtggtctttaaaggaaggcatagaaagaagacgcatcttgtggtggcaattaaaagcataacaaaaaagtctttggccaaatctcaaaatttgttaggaaaggaaatcaagattctcaaggaacttactgaattgcaccacgaaaacgtagtcgccctcctggactgcaaagaatctgctcacaatgtatatctcgtaatggagtactgcaatgggggtgatctagctgactatctcagtgctaaagcccttaagcgaagatcaattagacttttcttgccattagcggcgcatgcganttnatgccaaagctcgactcggactgaaccgagattctctgccatccgcagc

SEQ ID NO: 309 - DNA, 308 bp, Ctenocephalides felis
ttataaataaagaacaagaactgaaagaaaaatacaaagatgatcaaccgattgaatgtccatactggggcgggtatatagtaatacctcgatctattgagttctggcaaggccaaagtgatcgcttacatgatagaataaaattccgaaagttgcttccaaatgaacaaatagatttgaatttaacacatgaagcagataatggatgggtttacgaaagattatcaccttaaacttaaaattatttatatttttatgcaggaaagccaaaataaaaatagttcaataatttgaacttataattatgt

SEQ ID NO: 310 - DNA, 437 bp, Ctenocephalides felis
cacgattcaatatcgacgatttcaaaatttgctgcgttgactttataaattttataattcggatttcggttaacgtaagttgtaatacttcctccattgaatgcaacattaataggatgtgatgaattcatagaatcatagaaaatcttaaattcgtcattatgtgtgtggccattgaattgtcctgttattatatgcgaaaatctttggatgatgcgcctatattctctgtcccaagtaatgaagttagtgggttcaccaggaggaacatgtcccaaaatgtgcactttttcattagttctttctgcttctaacagagtatcatgtaaccattgcaattgctttttggggaatgcaggatcatacagtaaccacaaattataaatataggccacattattattcaacgctatgactcgtagtccaagtttaggtgt

SEQ ID NO: 311 - DNA, 173 bp, Ctenocephalides felis
cgaaacccgagcaaaaatgtaaaaaagtaaaatttagttgcgtgaattcgtgcagttcacccgaaatgcagtattgtccggaaataggagcagatccggttaaggaatcctgtagcccagatcaagtgtgcgctgatcaaagtggatatctacagtgcaccactaaagaaagt

SEQ ID NO: 312 - DNA, 337 bp, Ctenocephalides felis
cgtcaagtccaatccaaaagtggaagctttttcaggaaagttactaagagaggtgtcatttccaccagtgggatcgagaaataatcgcacaattagctgtgttcgtgccctggaccaatatgtaaatggccaaggaggctatgccactcttgtcaatggtggagttggctggaaaaatgtaactttactcctatcttctcagactggcaaaggatttaacttcttagttgaaatttggggatattagattagaaatataatgaaaatgtgaatatagaaaaaaaattaaatatacaatagtattttagaaaaaaaaaaaaaaaaaaaaaaaaaaaaa

SEQ ID NO: 313 - DNA, 498 bp, Ctenocephalides felis
  misc_feature (498)..(498): n = unknown
attgaagaccgtacacaggcctgttcaatctggaagctaagggttctaagggtgctacaactccttcaatcgcatgaactaagaacaaaggtttcttatcactcttgtcatcctttgatgtcaacctcaacaatactttttctggcatgagttcgttactggcaaagctgacttgtttgtcttcgctggtgactgcaccattggtcgttgcagaagtatcgccaccacctgcacctaattctttcagtttaccaaaggtgagtgatctgatttcttgggcattcagtactaagtcgtaatttctttctaaagtttgtttaatttcagctcccatcagcgagtccataccaagatcagagagggtagcagaggcctgtgtatttttggtgcccttaagacctaatatatttgcaactgcatcaactaaactaacacctcctgcaccagcaccagcgtctgctttcctcttatcagctaataccatggaggccaagacan

SEQ ID NO: 314 - DNA, 457 bp, Ctenocephalides felis
  misc_feature (3)..(3): n = unknown
  misc_feature (18)..(18): n = unknown
  misc_feature (37)..(37): n = unknown
  misc_feature (71)..(72): n = unknown
  misc_feature (103)..(103): n = unknown
  misc_feature (115)..(115): n = unknown
  misc_feature (117)..(117): n = unknown
  misc_feature (122)..(122): n = unknown
  misc_feature (168)..(168): n = unknown
  misc_feature (183)..(183): n = unknown
  misc_feature (222)..(222): n = unknown
  misc_feature (245)..(245): n = unknown
  misc_feature (338)..(338): n = unknown
  misc_feature (379)..(379): n = unknown
  misc_feature (388)..(388): n = unknown
  misc_feature (405)..(405): n = unknown
  misc_feature (411)..(411): n = unknown
  misc_feature (420)..(420): n = unknown
  misc_feature (432)..(432): n = unknown
  misc_feature (436)..(436): n = unknown
tgnggttggcattatcancaaccccaaagacaagcangttgaaatgtctgtttcaaaaataaactgcacanngatttttagctgaccctataacacctgtaanaagatttacaanancctcnaaactccatgcgaacaaaaatggaattacttgtgctacgaatacanggggaatttgttatntgcattggaaaatgaggaaaattttgattccaaatttcngattgatacatggaataggcaanatggtaaatggggtggaattacttgtgttttacaggatggagatgtgtttgaaaaagcgggagtgaatatcacagtaatgactggtgaactanaaccccaggccattcaacaaatgaaaagtcgtggaaaacanttcatccantgaaggtggaccactanaattcnttgcggcangtgttagtgcantaantcatcccaaaaatcctcatgt

SEQ ID NO: 315 - DNA, 498 bp, Ctenocephalides felis
tggcgaaactatgggtcactctgctgatagattggctgctgctttcaaagcatctcgagaagaacaagatgcatatgctttgaaatctcatacatatgctaaaaatgcacaggagaaaggatatttcacagacattgttccatttcaagttccaggtgtgtcaaagatggtagaaactgacaatggtattcgtgtcacatcattagaaagtctggccaaattgaaacctgcctttgtgaaaccccatggcacaattacagctgctaatgcatcattcttgactgatggtgcttcagcttgcctcattatgactgaagccaaagccaaggaattaggtttgacaccaaaagcttatctaagagaatttttgtatgttgcccaagacccagtcgaccagttgctgcttgggtcctgcttatgttacaccaaagatcttagaacgtatggtctgagttaaaagacatagatgtctgggaaatgcatgaagcttttgctggt

SEQ ID NO: 316 - DNA, 465 bp, Ctenocephalides felis
cactcgtgttcttttcccatcttcattttgactgcccaacataagtataatgtctttatcccctagattgctgcttgaaacaacaactgtatgcacatgacggctatgaaaccattctgtgcatttccatgcatcgtcaatgttatgaattttgcaaccagtgagcaactccacctcaaattgatttggagtaacaatatcagccaatggaataattagttctctataaattggtaataatgattctggaacatacatttttccattatcacctaacactggatcgcaaacgtatgtcaattttggatttttttctctcaattccttaacgacgttcgcaattgttttaagaaaatctggattagctacataacccgttaataagtgactgtagacattgataccattcaatgctaacccttctgccagctctcctaattccttgtccgttagaacttgcctcgt

SEQ ID NO: 317 - DNA, 500 bp, Ctenocephalides felis
  misc_feature (39)..(39): n = unknown
  misc_feature (61)..(61): n = unknown
  misc_feature (63)..(63): n = unknown
  misc_feature (106)..(106): n = unknown
  misc_feature (118)..(118): n = unknown
  misc_feature (137)..(137): n = unknown
  misc_feature (158)..(158): n = unknown
  misc_feature (182)..(182): n = unknown
  misc_feature (187)..(187): n = unknown
  misc_feature (205)..(205): n = unknown
  misc_feature (230)..(230): n = unknown
  misc_feature (244)..(244): n = unknown
  misc_feature (246)..(246): n = unknown
  misc_feature (267)..(267): n = unknown
  misc_feature (286)..(286): n = unknown
  misc_feature (290)..(290): n = unknown
  misc_feature (321)..(321): n = unknown
  misc_feature (368)..(368): n = unknown
  misc_feature (498)..(498): n = unknown
tttttttttttttttttttttttttttttttcttgaatncataataaaatttattattagntnattataaaaaaaatacttaaaaaatatattatatgcttaaatngtttcatgtagncatatatttattacatganctttttaactaaatctataangggttgaatcaattcctccgttgnagttncattgttattaacaagancaaaatcccagttttcataattatntaaatcacattcanangcaacatcatcaacaccttcngtaaatttccaacctcganattntcgaatgcatttactgcaattaattctaatngttataactttagcaccatatttttcaataaaccattttatatctgngttcctgcggatatcactaactatgcaaataggttttgaaattgcttggcaagccctttacaaaaataaccataatcttcatttcaaactcggtcgctccattctatcatactttctgagctttctttanat

SEQ ID NO: 318 - DNA, 585 bp, Ctenocephalides felis
  misc_feature (1)..(1): n = unknown
  misc_feature (396)..(396): n = unknown
  misc_feature (491)..(491): n = unknown
  misc_feature (506)..(506): n = unknown
  misc_feature (556)..(578): n = unknown
nctgacaatttatcttaatagaatagcacaagcaacattcgacaacttttcaatggctggggtctatttcgtgcatcgaagtcgttaaaggaaaattcgcctactgccaaacatgaagaactcatggcaaaagcatggtgttttgaggcttcagaacgcctagaggcaaatttaaaacatgtagtaagcggtaagcatttagatttatataccaaattagctacaataggcaaaaattcatgcgctgccaatggagttccgcaaaataatccattaaatttgtaataaatattaagtatgtgtaactaagcttaagttcatttaatttattttattgataaatactttaatttaacagaatgtaaatatttcattttatgtaaataattagggggnatttgttatcaagatcgtgcgccaaataagccttgtcatacagattattttcaattttgataataagtaatacaatgcgcattggtacattttgnaatctgaaatattgncaatggcctgatatatttaaatataaaatgaaaaaaattaaaaattaaannnnnnnnnnnnnnnnnnnnnnnggcttgg

SEQ ID NO: 319 - DNA, 363 bp, Ctenocephalides felis
  misc_feature (29)..(29): n = unknown
cctcctagttcacctgttttataatcatntggaaaaacatgatgataattgtgccaaccttcaccaagggctgcaattgcaacccctaagttttccactggacttatatttttgtcataaggtttctggccccacatatgtgcaacactgttcacaaaaaatgcaatatttagggtcaaacagaacctaaaattaaaattgacccaaaaagaaacccataggtcttcttgccaaaaataccaaggcgccaaaaccggtaaacctatggccaatagggcaaatagagggatgtaaaaccttttttgccacatgactactgcatcggcttccaagtcactcatatcaacctgtttccttttaagt

SEQ ID NO: 320 - DNA, 223 bp, Ctenocephalides felis
  misc_feature (32)..(32): n = unknown
ttcatcagaagtgtttccacagtctggccaanttaagctatacccttggcagctagttgtgacgattctcctaaattaggatggactaaatgagccatgttcggtgctccaccaatgcctatgctacggaatgcacgttttgaaacttcatcgaaaatcatacccaaatttgctgcagggtttttaaatgctttttgtaattctttcaaatgtgcaccagcgt

SEQ ID NO: 321 - DNA, 337 bp, Ctenocephalides felis
ttttataagcagaaccaccaggtgaaagataaacgttccaggatcctgcattattgaaaactttcagaaaattaccagataatttattttgtatacaaaacgtgtctgtatatgcagcagcctggatggaagatggtaacttttgtattagtttggtaacttttttcttttcatctggttgaaaattggatcgttcatacacttttttgacgcgttgcacaaaagtgaaaaaatcatcgtaattattggtttgcaataaatcattcactacaaataacccatgaatgctcagtggtaagttactgttgtaactaacaaaatctatgagagaaagtgt

SEQ ID NO: 322 - DNA, 549 bp, Ctenocephalides felis
gaaccaacaaattccatctacaaccaaatttaatattaaaatttgaaatcatttttaaaaaatgatcgtcagaagtgttttgggcctttgtgtcctggttgggctcctggtgtctgcaaaagcagatttaacagatgacgtcatggctaggatgcctgatgacttcaggagggagtatttgtaccagaaaaagttgacagtggtggatctgattgagcaaaatggttacccctgtgaaacccaccaggtgacaacagaagatggctacatcctgaccgtctacagaattcctcacaacagaaacaacgacaccattaccaggggagcagtcttcgtaatgcacggactcctgtccagtgctgctgactgggtcgtcctcgggccacatcaaggactaccatatttgctttccgaccaaggctacgatgtttggctaggaaatgcaagaggcaacacactgtcaggaatcacacacattgagtgtgaagagtggtgaatctggaattagtggaacgagattgttatacgatttgctgcatgatcgatacg

SEQ ID NO: 323 - DNA, 369 bp, Ctenocephalides felis
ggatgtgatgtgtctaaaggggaaactttgtctgaatatattggtagtggaccaccacagggcacaggattacatagatacgtttttctgctctacaagcaaccggataaaataaaatttgatgaattgagactgactaacagaagtggcgataatcgtgggcagttcagtattgcaaaatttgccatgaaatataatttaggtcaacctattgctggaaatttataccaagctcaatgggatgattatgttccagaactctataaacagttgggagcttagctggctaaaatatagttcaataataatatgaacaatgtttgaattttaataaaactattatttgttgataaaaaaaaaaaaaaaaaa

SEQ ID NO: 324 - DNA, 549 bp, Ctenocephalides felis
gcatattatttatttttatatatgtatatccagctagataagttaaacatgcactcattgagtttcatcatcttttagtagtggcatttcgtcttcttccccttcttgacgaattttgatgtgggcatttttgtcagtttgtgattgcggtgcttgtgtagaaccaacactttttggtggatatggtattctgaacaattgaattcggagatgatcacatatttctaagcagacttgtgcacagtatctcatcagatcgaagatggacaaagccaaacaaaggcagagaacataatattcatttacaaagttgttgaaatactgatttaggaataataaagatggtcctaatagagcccagtctaaatattccatttcactttttgtcatatgcgcgaccactaatctgtttgtgacctttgcagctccattccaaaggcgagaatatacaaagcgggatgattctcaaatatattgctggactcttctggcaaataatgaatgcaggaatacaaccaaactgaatggattattggtacaaacctgtcc

SEQ ID NO: 325 - DNA, 549 bp, Ctenocephalides felis
  misc_feature (481)..(481): n = unknown
  misc_feature (515)..(515): n = unknown
  misc_feature (527)..(527): n = unknown
gacaaatccgagaacttcgatgattacatgaaagccttaggtgtcagtctagtcacccgtaaattgggcaaccaagtgagcccagtggtagagctgactaagaatggagatacctataccttgtcatccactagcaccttcaaaaattccatcatcacattcaaacttggtgaagaatttgatgaagagactcctgatggccgaaaggtaaaatcggtagtcaccttggatggtgataaactgactcatgaacaaaagggagataagcccaccaaaatagtccgtgagtttggaccaactgaaatgaaagcagttatgactgttgatgatgtggtctgcacgagaacttacaaagcattgtaatttcaacactacggttttctatttttgccttaagttatatgcatactcgtatggaatctgttataatacagactaattgactaattatggcattgtaggatgctgcttgttcatctgntaaagtactgtttaacttttttgttttatcgaangatgaaattaancttaaaaaaaaaaaaaaaaact

SEQ ID NO: 326 - DNA, 298 bp, Ctenocephalides felis
aagctaccaccatcgcaaaatgcgataatggagctcctttgccaaccagtgttgacgtcgaaggatgtgacaaattaccttgtccattagttcgtggtagcacttctttgactgatgttaaatttactgtccctgccgattctgctactctgaaaccagaggtaaaagccaaagttgccggtgtcaccgttccttacccattacccccagagctaagtgatgcttgccaatttcttaaggaaggatcatgccctttgaaaaaagacgataaagtcacatacaatctaaaagttccagt

SEQ ID NO: 327 - DNA, 598 bp, Ctenocephalides felis
  misc_feature (440)..(440): n = unknown
  misc_feature (447)..(447): n = unknown
  misc_feature (457)..(457): n = unknown
  misc_feature (501)..(501): n = unknown
gaaatcaataagacattatgaaactaataaacagtatgaaagtaataaacaatatgaagctagtaaacaatacgaaggccataaacaatttgaacctagtcgaccttttgaagctaataaacaattcgaagctagtaaacaatttgaagctaacaaacaattcgaagctaataaacaattcgaagctaataaacaattcgaagctaataaacaattcgaagctaataaacaattcgaagctaataaacaatttgaagctagtaaacaatatgaagctaataagcaatatggagctaacaaacaatatgaagctaataaacaatatgaaagtaataaaccatatgaaaccaataaacaataccattcaatgagcgaacgtcatcatgaatttagcaaatcaggaggatatggaggctcgaatttcgatcaaaatcaggcanatgcaanaaactttganagaaacggaaaatttgaaagcagcggaagctatcaatatcacantgaacaaatggcgagaaatctactgattcaaataagccttactcctaaacatatcgatgagctaatagaaacgttatctgatagttcaatgtactcg

SEQ ID NO: 328 - DNA, 221 bp, Ctenocephalides felis
gaacaatatagataccaaaatcattttgaacgagatggaacttgcgcaagagctcacatggaatctttagttgatggtaaaataaaattcagacatgtcatggaagaaaatggaaaaaaagttgaatttagtggacaactcagacgtaatgatgaacattccggtaatggatatctgagaatcagttatgaagatacaaatcgagaatcagattatatagt

SEQ ID NO: 329 - DNA, 489 bp, Ctenocephalides felis
ttgatagacagatcagtcgcatcaattgaatcttgagctattttgctcaattgactattttgctcaattggaactgactgaatagacggaattccttcaatactttgacttccaattccatctccaagaattttctctaatttttgggtgaataaggaacttctaattgacgctgagtcagaatttttatctctgagctttacagaactagatcctgtattagttttatcagtttcgggtttataacaatcatcacattgagaattcaccagtcctgcaggatcaactatttgaatattgtcattacagtgagctttatcatcgttgtctttgaattcttcatttttgatatcgatttcatttttagtttcgggaaaatctttcagcgctccgtcacgtagtaagctagattcagtggaagatattgaactacttctaattgatttaatggatgagttattgctttttgaagagctttttcgaagttca

SEQ ID NO: 330 - DNA, 352 bp, Ctenocephalides felis
cagtttgtccaattactcggaatggccaatgcttcgaatcttgctgcactgcaggttcttcccattttctaccaattaatcgtttagcatcaaatacagtattttttggattcatagcggcctggcccctagctgcgtctccaaccaaacgttctgattcagtaaaagcaacatagcttggcgtggtgcgatttccctgatcatttgcaataatctccacttttccctgctgccatactccgacacaggagtatgtagttcccaaatctattccaatagctggcatttttttctatgttagactgtttgattgttaatcaaaattaaatccaattgaactcgaactttgcgt

SEQ ID NO: 331 - DNA, 265 bp, Ctenocephalides felis
  misc_feature (58)..(58): n = unknown
ttttttttttttttttttttttttttttttttctgcatcagataatacctcataagcnggtcctagatcttgaaacttcgaggctgcatctggatcgtttttattcttatcaggatgcaattcctttgcttgtttcctataagctttcttaatttcatttaacgtcgcactacgagatacttttaatattgaatagaaatctcgtccagcgctggctagtaaaaaataaatacttaagttaactaacactaaataacacagtttg

SEQ ID NO: 332 - DNA, 498 bp, Ctenocephalides felis
acatagtgatcttcatcataataaccgatgtcaccagttttgaaccaaccagtttctggatccaaaacttcagaagttgcttcaggacgaccataataccctaacattgtagggccacgtagatacatctcaccttgccgatttggccctaaagtttctcctgtagaagtatccacaatcttaagttcagtgttcattaaaacgtgtccaacagttcctggtctatattctgcgcaagttatagttgtagttccacccatacattcggtcaaaccataagaaaccaccaatttaccatttgtcaaatgtttttgcatagtctcgacctgttgtggtgacaatttggaaccaacagcaaacagcaacattacatctccaaatggttctgcaagttcttccttatcttgtaaatacaaattcatcagagacaattggtaagatgatagtagcatcaggcctgcttgtattcgcgcataattctcaataagtttcttcgtt

SEQ ID NO: 333 - DNA, 500 bp, Ctenocephalides felis
  misc_feature (12)..(12): n = unknown
  misc_feature (20)..(20): n = unknown
  misc_feature (22)..(22): n = unknown
  misc_feature (70)..(70): n = unknown
  misc_feature (359)..(359): n = unknown
  misc_feature (427)..(427): n = unknown
  misc_feature (439)..(439): n = unknown
  misc_feature (446)..(446): n = unknown
tccgaagccttngccgttantntttactcatcactccagagaaggcaataaaattggcagcaaacgactntttcagacaccatttgaaggacaaaaatggtaatttaccaataacaaatcaaatggtggctggaggggttagctggattatgtcaaatagtaataactacgccaatggaattgttgaaaatacaaatgcgggatgcaggacggatagctgctcaaaataaaaaagctggaatagccactcctaagataccagctactgaattaacttttggacttattagagacaaaggtattttgggtctatataaaggaactggtgccactatgctgcgagatgtttcattttctgntgtttactttcctttgttcgctactcttaatgcactgggtccaagaaaaagtgcggattctaatgaancaagtttttggngctcctnttatctgctgcgctgttggatcaatggcggcattagttgtcaatccatttgacg

SEQ ID NO: 334 - DNA, 500 bp, Ctenocephalides felis
  misc_feature (43)..(43): n = unknown
  misc_feature (89)..(89): n = unknown
  misc_feature (381)..(381): n = unknown
  misc_feature (410)..(410): n = unknown
  misc_feature (426)..(426): n = unknown
ctcctgcacgctttcaaatttcacactgatctattaatacagncttgaatcacatacagactcctcatatgtataatcacatataatgnttcataagccttaattgaaatggaatttaaattgaaatggtgatccatgatggaagtgatggaacggtgaaccaccgccccctctgtgattatttgcagattctggatctaaaggatcttcaccgttgtcaaactgagctcttttctcaggatcagtaagaacctctttagcagcagcaatatctataaatttattctctgctattttcttttcatcatctttgaaattatcaggatgccatttttgtgctgcttttcgataagctttaatgatctcttgctttgtagctgntctttttacacctagaaatttataataanctcttctctcacttgntttgtaaccctgagccttcaaaagcccatctttcgctctctgacatgctcatttatttccaaagctgatttata

SEQ ID NO: 335 - DNA, 500 bp, Ctenocephalides felis
  misc_feature (1)..(1): n = unknown
  misc_feature (19)..(19): n = unknown
  misc_feature (21)..(21): n = unknown
  misc_feature (53)..(53): n = unknown
  misc_feature (70)..(70): n = unknown
  misc_feature (114)..(114): n = unknown
  misc_feature (120)..(120): n = unknown
  misc_feature (370)..(370): n = unknown
  misc_feature (404)..(404): n = unknown
  misc_feature (429)..(429): n = unknown
  misc_feature (444)..(444): n = unknown
  misc_feature (462)..(462): n = unknown
  misc_feature (467)..(467): n = unknown
  misc_feature (486)..(487): n = unknown
  misc_feature (491)..(491): n = unknown
naagacgttttgaaacctncntttaaaccatttgggttgggggctggggtaanttttaaggaaacccttncaaaaatgggcacctcaactggtgcaaaacgtttttggcttttnttgggnccgtggtctttagacaaacgtgccagagggcttttcacgaaaaccaaggggagggcattgtcattcctgagaagggcgcaagcaaaaagttctcaagggcagagttattgcagttggcccggcaaagaaaccaactggtgaacatgtgcccctaggaatcaaaagtggtgacatggtttgctgccgaatccgaggcccaaaagttgagctcgaagagaacaagaattccttattcaaagaatccgatatncttgccaagttggatatcgacgaataaattgccnaaaatttaccatctttcacaatttncccaacacaaactgnattcgaagctgttgcttnttatnaaagtagcaatggtttttnnttgngggtctctt

SEQ ID NO: 336 - DNA, 482 bp, Ctenocephalides felis
  misc_feature (32)..(32): n = unknown
  misc_feature (39)..(39): n = unknown
  misc_feature (388)..(388): n = unknown
  misc_feature (425)..(425): n = unknown
ttatataatacaatttattataaaattaacgntctaatngtatcccgtgtaattaattattttaataacgattttttacttttttataatatatatgtattatattccctattatataatacaatttattataaaattaactatctaatatatcccgtgtaattaattattttaataacgattttttttactttttataatatatatgtattatattccctattatataatacaatttattataaaattaactatctaatatatcccgtgtaattaattattttaataacgattttttacttttttataatatatatgtattatattgcaaaaatgtaaaaaagtaaaatttagttgcgtgaattcgtgcagttcacccgaaatgcantattgccggaaataggagcagatcccggtaaagaatnctgtagcccagacaagtggcgctgtcaaagtggatatctcagtgcccactaagaaag

SEQ ID NO: 337 - DNA, 418 bp, Ctenocephalides felis
  misc_feature (402)..(402): n = unknown
ttgacaagcaaaataaaatacatcaacgttgttttttacggccacttgcaagttatttaatggttccattttttgaacaactccatttgttccaagaaccaatgatgtttcatatgtttgtgatggttgtaaattcggaacttgtaatggtgcaccaggtgccagaccaaagctgtttttattcaactgtatggcaaaaccactcatagcttgcattgctttgttggtgtagctcatgtccatgtaaatctgtccacttctcctggagaatgttccatatatttccaaacctttgcccttttcagctggcaaccacaatgcttttggtataacaaaagggccagctgatcccacagagaatatttctcccagaagtccagagttaccgatgttattaagtanaattgacatctgatgt

SEQ ID NO: 338 - DNA, 549 bp, Ctenocephalides felis
  misc_feature (4)..(4): n = unknown
gtcntattccattattccatgcacacaatattcaggcgaatgagcctgctttaagcactctaatttgttcaaagtaaacgtaccggcccacctcgacactcggtgaagagcaccgtggtaggattttgagttgggccgccttttgacaggctaagcccaccggtaggacgtcccacagacatgccagttgaacaccgcgagcggtgaaccgacagtgtgggacacagattcaactacgagctttttaaccgcaacaactttaatatacgctattagagctggaattaccgcggctgctggcaccagactggccctctaatagatcctcgttaaaggatttaaagtgtactcattccgattacggggcctcggatgagtcccgtatcgttatttttcgtcactacctccccgtgccgggagtgggtaatttgcgcgcctgctgcttccttggatgtggtagccgttctcaggctccctctccggaatcgaaccctgattccccgtcccgtaacaaccatggagtcgcagaactacctcgacagtgataag

SEQ ID NO: 339 - DNA, 549 bp, Ctenocephalides felis
aatctctgaaactaattacgagtgcagtagcaattctttttttactaaaagaaaaataactttggaacaaaatggcaagcacaagaccccacagggagaacatgacagacgaacagattgcagaattccgtgaagcttttgctttgtacgacaaagacggagatggtgcgatatcagccgccgaattaggaactgtcatgagggctttgggtcaaactccttccgaagccgaacttaaaggatacgtcaaggataatagcgtggccatgaccgtagattttccaacatttttgacaatgatggctcgtcagatgcaggaaggcagcagtgttgatgaaatccgggaagccttccgggtttttgataaagatggtaatggccgaatgtctgttgcggaattgagacacattttaacatctcttggagaacgcttaacagataatgaggtggcgcaatgatccgagaagcagacgtagataatgatgggatgtagattatgagcaatttattcaagcatgcgatgagttcataatataaaaataataataa

SEQ ID NO: 340 - DNA, 549 bp, Ctenocephalides felis
  misc_feature (4)..(5): n = unknown
  misc_feature (34)..(34): n = unknown
gacnntataacaaaccgagattatttttgaaatnaaaggtattaggaaaaattattgataataacataaaagtctaaatgcttttataatatgacagcaatgcgtactgcaatgaatgttgtgtatacagttttgtggattctattaatttcacaaggtacccaaagcgttgaattaacttttgaactaccggataatgcaaaagaatgcttttaccaagatattcaaaaaaatacaagcgtcaccttagagtttcaggtcgtcacgggcggtcagtatgatgttgatgtaacattagaaagcccaaataagcaaattatatatagtcaagtgaaaacccaatttgattcgcatcatttcactgcaccgataagtggtgtttacgttgcttgtttcagtaatgaattttccacgttctcacacaaattggttatatggactttcaagttggtgatgaacagctttacccggtgtcggggagcatgctacagtcttacccaacttgaatctttgccaagagattcatcgaagtttgccagtttctcaatt

SEQ ID NO: 341 - DNA, 549 bp, Ctenocephalides felis
ataccaaataaagtttgtttgtgagaaaaagtatttgcataatttggattatttccactatatcagattactcatttgaaccatgtctctcgtaccattgttgtttcacgactggtgggaggattacgaccacccaatgcgtcttatggaccaacattttggaatgggcctaaatcgtaatgatcttattactaatctaagggccactccatcactcttccgtggcggttattacagaccttggaggaatgaaattactgctgacgattcttcatcaactatcgttgctgacaaagataaattccaagtgactttagacgttcaacaattcaaaccaaaagaaatcaccgtaaaaacaaaggacaattgcgtaatcgtcgaaggcaaacacgaagaaaaacaagatgaacacggatacatttcccgtcattttgttcgacgatatgtcttgccagaaatcacgatgctgccgatgtagtatcgagtttgcctcggatggagtattgccatacagcgccaagaaggccttcagtgagcagacgagtggcc

SEQ ID NO: 342 - DNA, 383 bp, Ctenocephalides felis
  misc_feature (4)..(4): n = unknown
agcnttaaataacaatttcaaattcaatatgaggaatttagtggttttcgggttagtgttggtagttttatttgttgttacaatggcagaagacacaccagatgaaaatgagaaattcgaagtgggaatgtcagaggtttctttgaatgatgtagagccagcaccacgtgtagtatgccaacttggaggaaacagattatgcaatgctcggtgcatatctctaggaaaaagaggaggctcgtgcaaaaaaggaacttgttactgcagaaattgaagaaatttaatatagcataatatattagataaactttgaataaaaccgtgttaaaaattttgcgcaaaatatataatatacctacaaattaaaaaaaaaaaaaaaaaaa

SEQ ID NO: 343 - DNA, 549 bp, Ctenocephalides felis
aacagctgtttgtgccgtacggtggtccccgcgtgtgtagcattgtagcagtatcaaagcgaagctcgatcgatccggtcgagacgtgaagcccgcgcgatacccccgcttcagagacaatttacagactccggagttaatatcacgaaaccactttgtgttcgacttctcagtacgacagtgtcggtcatttcaaacgcgcgttgtgtgtgtccatctatcatttacaacggggttcctgatttttcgaaggttcagtaataattttcgtatttcgttatggcgatgagatgtgtaggattgctcgtcaagagcaccatggtccagtccggacagcgcaggctgatatcccaatcagctgttgctatgaacaggatgcttcaggattcaccaaacgctcacctagataaatcaatcttgcaaaggtacactcgtcttctcaagacgatcggtcacgcaggtcacttacgtgtggatcgatggacggtgagtacttgccgctaaggacgtgtcttgaattaacctccaaaccagaaactgcaaatggac

SEQ ID NO: 344 - DNA, 549 bp, Ctenocephalides felis
tatcaacttaaataccagcatcaaaatggtgtcagctggcatgacgtgcgtgaagtatttattgttctgcttcaatttaatatttgctctttcaggactaaccattcttattgttggagccctaatccaatcatcttttcaccactattctgaatttgtaaatgctagtgtctggtcagctcctgtcttgcttattgtaattggcgcaattgcgtttgttatcgcattcttcggatgctgtggtgctgtgaaggagagcaattgcatgatctatacctttgcagtatttctcattggtatatttatattggaattatctgctggaatagctggctatataaagcatggtgaacttgctgaaaccttggaaaataattttaataccagtatgaattcctatattgatgataagcaaacacgtgcaacatgggacgttatccaggaagatctcgattgctgtggtatgaatggccaagtgactggaaaaaagtttttaataatgaccaattccaaaatcctgtgtgatgagctccaaagtgatttgaatgc

SEQ ID NO: 345 - DNA, 549 bp, Ctenocephalides felis
  misc_feature (434)..(434): n = unknown
  misc_feature (510)..(510): n = unknown
ggcttattgacgttagtataacctcgtttctaattcatactgaatttctcaatttatcagtataattaaagatattgttcatctgctttccaggtgtacgtcttcagatctgtaagtaaaaatattttacaagccgtccgagttcattgtgttcattcgagctgtgttagcattgcacttcaattcctcaagtttcatacataattcaaaatggctcgtactaagcaaactgctcgtaagtcaaccggaggaaaagctccacgaaaacaattagccacaaaggctgcgcgtaaaagtgctccatccactggaggcgtcaagaaaccccatcgttatcgtccaggtactgtcgcccttcgtgaaatccgtcgttatcagaaatctactgaattgtgatccgtaaattacctttccaacggtggtgagagaaattnccaggatttcaagacagatttgcgttttcaatcactgctattgcgctctgcaggaagcagtgaagcttcctctagnttgttgaagacaccatttggtgccttcatgctagaggta

SEQ ID NO: 346 - DNA, 550 bp, Ctenocephalides felis
  misc_feature (550)..(550): n = unknown
gacatcattactggtgatgagatgttctcagacacatataaaataaagttggtcgatgaagttttgtacgaagtgaccggcaaattggtttcaaggtctcaaggggatatccaaattgaaggtttcaacccatctgctgaagaggctgatgaaggaactgaaacagccacggaatctggtgttgatgtggtcttaaatcaccgcctttgtgaaacttttgccttctcagataaaaaatcatacactctttatttaaaagattatatgaaaaaattggtggcgaaattagaggagaaatcaccagaacaagttgaggtattcaaaacaaacatgaacaaagtcatgaaagaaatattaagccgttttaaagaaatgcaaatgttcactggtgaatcaatggattgtgatggcatggttgctcttatggaatatcgtgaaatagatggtgaatctgtccaattctgatgttctttaaacatggctagaagaagagaaatttgaacaatacactatttattatgtgaaactcatcttaatatactgattttgn

SEQ ID NO: 347 - DNA, 550 bp, Ctenocephalides felis
agaaaatcaacttgtgtcacggcaactgggacagtatcacctatgaaaaatgaatttggaaaagttgtttgtggtgatcctgtgtctgtgcttggttgaaagttcaatttgtgccactgtcatctcaaaagatgatcaggatttatatgagctatctatcatacatctgaatgattttcacgccagatttgaagagataacacctcaatcaacagcttgtaataataaagaagaatgtatcggtggaatagcgcgtgtctataccgaagtaaagcgtctgcaaaatgaaaggacaaatccaattttcttgaacgcaggcgacaattttcagggcactctttggtacaacatacatcgatggaatgtcacgcagtactttttaaataaatttaagactgatgctgtgacattgggtaatcatgaatttgaccataagattgaaggtgtggttccattcatgggttccatcgaagcacctatcgtagtgtgcaacattgatgactcgcaagaccacatttcagggcaaatcaaaaagacattgtttagacgc

SEQ ID NO: 348 - DNA, 550 bp, Ctenocephalides felis
ggaacgtgcaaagaaagatccccaattttatatgctttggtctgctgatgatcagcctgaacatatgcgtagaattcataaacacattgcggcgccgaaaagacacttgccaggtcatgctgaaagttacaacccacctccagaatatctatttgacaagaaagaattgaagcaatggaataaacaaaaggacacaccatggaagcgtaaactacattttgtacctgaaaaatataattcactacgcgaagtaccatcatattcaagatacattaaggaacgtttcttacgttgtcttgacctttacttatgtcccagagctataaaaatgagattgactattgaaccggaagctttggtaccacaactaccaagtcctaaagatttgcagccattccctactgtcaaagtctcgtctataagggacataaagacatgataaggtgcatgacaatagattgcttggacaatatctggctacagggtctgatgacatgcagtaaaagttgggaagtttgcaccgccgtgttgccacaatatatgtccggga

SEQ ID NO: 349 - DNA, 549 bp, Ctenocephalides felis
  misc_feature (505)..(505): n = unknown
  misc_feature (535)..(535): n = unknown
ggaacatttattcgtgaagctagcactagtcatgcattgtttggtaaacatattctcactgtagacatgttcaacaaagaacaattaaatgatattttcaatttggctgaaaatatcaaagctcgcgttgtcaaagatcgaccagtagatgaaattttgcgcggtaaggtaatggcttctatcttttatgaagtgagtactcgtaccagctgcagctttgctgctgcaatgcagaggctcggaggccgagtgatccatatagatgaaactagctcatctgctaagaaaggcgaaactctagaagattctgtttctgtcatggctggttactcggatgtaattgtacttcgccatccagaaccaggagcagtagctaaagtggctgcgcactgtagaaagccattaataaatgctggcgatggagttggcgaacatccaactcagcgtgcttgatatatttactattcgtgaagaaatggtccgttatggttgactatactatggncggacttgaaaatgcgtctgacctcattgntcgttggtgcgtat

SEQ ID NO: 350 - DNA, 536 bp, Ctenocephalides felis
cgattccgaagtgcaagaggcatacgaatatctgaaatcggatgaatttgccaaagcctggaagtatgctgtcgaacatccggatattttggaaattctggattatttacaggaaagcggcctggacattgtagagcttttgaacaaaattgctgactatttaggtctccagaccttggaaccaagatccatcaattacaacgatgaaattccaatttccacaggtggtctcaaggaattggtgaataaaattaaggacatgttacctttaaccgattttatgatcttattcttcgacaaaatggacaatagcgatgacttccagaatctaatgacccgcattcaatctactgattttcaaaaaattatcgattttgtagaaaactctccagaaattttggctctaattgataaattggaaaatttaggctttgatgttgacacaataatcgatttcatcaaaagcttcttcggtggcttaataaaccggatgtgatgaaataaatatagaatattcgtaaaaaaaaaaaaaaaaa

SEQ ID NO: 351 - DNA, 284 bp, Ctenocephalides felis
  misc_feature (4)..(4): n = unknown
cctncctcctcatttaaacaatgcttgtgatcatttgaacgatggcgcccaatgccccttgaagaaaggtgaccaagttacttacaatcttaaagttccagtactgcaatcttacccttcaataaacttggacttgatggtgtcacttgtggatgacagtaatgagtcagtagtatgtttcaagatcccgtgcaaggttgtataagtagccaaaataatttttgatttgttattgatggaacaaaattaaaataataaaattgaaaaaaaaaaaaaaaaaaaaa

SEQ ID NO: 352 - DNA, 549 bp, Ctenocephalides felis
  misc_feature (537)..(537): n = unknown
cttaagtgttcagaatgccacaatcaatgcatgtaaatggctatgccaacggccacagcggttccttcgatatggaggatggatctgttttcttgtttacttcggaatctgttggcgaaggacatccagataaaatgtgtgatcagatcagtgatgctgtattagatgctcacttgaagcaagatccaaatgctaaagttgcttgtgaaactgttactaaaactggaatggttctcctctgtggagaaataacttccaatgctgtagttgattatcaaaaagtggttcgtgacacggtgaaacacattggttatgatgattcatctaaagggtttgactggcgtacccttaatcttctggttgcattggaacagcagagtccagacattgcgggtggtgtacacatgaataggcaagaacatgacataggtgctggggatcaggtttcgactataggacctgcaatgtctacttgcattgatctcagcacctatatagcagctggagtcatgacatcgaaggatgaaaaatgggcangaaacagggtta

SEQ ID NO: 353 - DNA, 550 bp, Ctenocephalides felis
  misc_feature (476)..(476): n = unknown
  misc_feature (493)..(493): n = unknown
  misc_feature (530)..(530): n = unknown
  misc_feature (535)..(535): n = unknown
  misc_feature (537)..(537): n = unknown
  misc_feature (542)..(542): n = unknown
  misc_feature (544)..(544): n = unknown
ttttacatcaggagtgtgtgcagcctgcatgttctttgtttacaataaacgtcacaatttaatcgtgtctgcagtcttcagctctgttatatcttgtggaaatgcagcgttggactgtcttatcaccgaggtgtttccaacaaatttgagggctactggtgtggcaatatctatggtagctgctcgacttggaggcataattggcaatgtggtaattgcaactttattagacatgtattgtccagccccgacatttattgtagcactactattggctggaggtggtctgatgtgtctatttttgcctaacacgaccagggaaccactttcataagaaaatctcatcgtataacagtcgggcgatataataaatatatttattcttctgctccatcccaaaaacttgattttgaatttaaatacttataaaataatgagtcttttcttataaaaatgtatataaataattatcctanagtcgttcattaattanttcattaatgatgacttcgttattaattaataactantaccnancatcnanaaaaaa

SEQ ID NO: 354 - DNA, 498 bp, Ctenocephalides felis
  misc_feature (390)..(390): n = unknown
  misc_feature (447)..(447): n = unknown
  misc_feature (453)..(453): n = unknown
  misc_feature (460)..(460): n = unknown
  misc_feature (481)..(481): n = unknown
  misc_feature (498)..(498): n = unknown
taatgtcgtagaaaggtgaaaaactgcgagttgtttgcacagttgtaggcaaacctacaccaacagtgtcatggaaagttattaatgagacttatgacgaatcatccgatcgaatcaaattgttagatcatgacaatataccaaattctgctttggaaattgatttggctgaaaaaagcgatcgaggagaatatacatgtattgctactaatcaaggcattggaattactgttaattctacaaccttggttcgagttcaagataaattagctgctttgtggccatttttgggtatctgtgctgaagtaataattttatgcgcgattattctcatttatgaaaagaaacgcaacaaagctgaaatggaggagagtgatacagatcaaagtncagatcgaaaaaatactcctgtcacatgaaggcactgtgtgaggcataggaagtaancaaaanttaatcngttgaataaaagttatgcccngagtgaagtatcaaagn

SEQ ID NO: 355 - DNA, 498 bp, Ctenocephalides felis
tattgttggatggatggtgactttcatcagctgctttgaggatatcgtgagcggcacttaacataactacatatccatagttgttgcataatccaaggatccagtaggccaccaggtcccgccagaggcctctgtcttttaaaggagtggattcgtgaggcgattctggatttttcgttggagtcatcattttaaaaatcaagtaaaaatcacagatgtatgcttacaggttaatttaatttatggagcagaggttctccaccaaaaatcgaagatactttaaatattgtaaacaagaccacacttcaagtctggttaaaatttaaccaatgtatgatgtcctgaatgtagatttctgctagtccaaataatgtttcaataaattgtaattcagcacaaactattctaagttcactaggcttctccaacaatctaaatccaactcattatcttcttcttaatatgcaccaagatcagtcttttggtcatttttagcta

SEQ ID NO: 356 - DNA, 269 bp, Ctenocephalides felis
gtgttgagtggtatcaaaacttggtcacccagtttatgagagaagtcttgccacaacatttccaaagcatttgtctggtgtagcaaaacatcgtgcccactccatgggctttcgtagacttcagatactgcttccattaaagacttggaagcactttgcacagctctaatacatcttatgtagttattaaattccttttgcagtctattagcactattttgctgcctggtgaagttttgtaaatgctcatcaaaaatatcatctgcggt

SEQ ID NO: 357 - DNA, 498 bp, Ctenocephalides felis
taatgtcgtagaaggtgaaaaactgcgagttgtttgcacagttgtaggcaaacctacaccaacagtgtcatggaaagttattaatgagacttatgacgaatcatccgatcgaatcaaattgttagatcatgacaatataccaaattctgctttggaaattgatttggctgaaaaaagcgatcgaggagaatatacatgtattgctactaatcaaggcattggaattactgttaattctacaaccttggttcgagttcaagataaattagctgctttgtggccatttttgggtatctgtgctgaagtaataattttatgcgcgattattctcatttatgaaaagaaacgcaacaaagctgaaatggaggagagtgatacagatcaaagtccagatcgaaaaaatactcctgatcacatgaaggacactgatgtgaggcataggaagtaaaccaaaaatttaatctagttgaataaaagttaatgcaccagagtaggaag

SEQ ID NO: 358 - DNA, 498 bp, Ctenocephalides felis
cttggcatctagttttgtaaattcagtttggctgtttattttgctgcgatatttcaatggatttttcgtatctggaggaagtgcaacaatatatgcatatttaggagaatttcataatcctaggcatcgcagcagggctattatgggagcgtcaagcatcttcggatttgcgtgtcttgcattaccgacggttgcatggttaattataaatcagaaatggtcattctatattgactttttgggatatacatacaagccctggaggttgtatatggttgcatgtggtttgccatcactgctttgttgttttgctttgtggaaattaccagaaagtcccaaatttttgatgaatcagggaagaaacgaagaagctcgtcaaattattgccaaaatgtatagaattaatactggtaaaccagaaagtgaattccccgtatcatcaatcttagatgaatatccaggagtggatggtgaaaatacaaataaaacaaagaaatc

SEQ ID NO: 359 - DNA, 749 bp, Ctenocephalides felis
  misc_feature (573)..(573): n = unknown
  misc_feature (577)..(577): n = unknown
  misc_feature (579)..(579): n = unknown
  misc_feature (618)..(618): n = unknown
  misc_feature (647)..(647): n = unknown
  misc_feature (656)..(656): n = unknown
  misc_feature (667)..(667): n = unknown
  misc_feature (678)..(678): n = unknown
  misc_feature (698)..(698): n = unknown
  misc_feature (702)..(702): n = unknown
  misc_feature (729)..(729): n = unknown
  misc_feature (742)..(742): n = unknown
  misc_feature (747)..(747): n = unknown
ccatttgcaaggaattatcagtgtaatccaaaaacaatcctgtccgcacgcaagcaaagggttgcgatggtcctggtcctggtggcggtggtggaggtgcagctgtcgccaagcactcggataaaggcgcttgcacgcattgttggtaaagcgcgctgaagtatgtctgtccggcgcatgtaaagcgacccacgttgaaatttcctccagagagtctcacacattcaaaatatactttgcatgttttgtctgctggatctgcaaatgagccgctctgcacgcagttgtatatgggcggcggcgtaggtggttgccaaggcgctggaggatttcttaggcactccgaaagggaagcgaccacacattgctgatacgtgctgctgaagtaagtagaaccaggacaattgtaacgcgctacactgaatcctccgcctgctttcaaagcacatttgtagtatcctttgcaagtgctgtcatagggatctataaacatccctttctgcacgcatgaaaaaagaagcggcggtgctggtgtaattggccgtagtcgtagtaatcggacaattggaggangcanangtgtaattaaacattccgaatatgtagggcccacacatntttggtaaaactcacttatatccaagttncattgggcntaaaaaatgancggttttgcanagcacccttttaaaccaagnttgnacttggagtacctttgggcgggacacncttaacccaaatnttgcnga

SEQ ID NO: 360 - DNA, 450 bp, Ctenocephalides felis
  misc_feature (34)..(34): n = unknown
  misc_feature (65)..(65): n = unknown
agaattagaattgacacaaaatgctttagtgaangaaatgaaattaaaattgatgattattgatngattttataccaaatgaaatcaaagataaattttatgcaaatgcaaagtttgatgaagatttggacatatggacagttgcaataactaaagaaatgttgccaccaagacgaccgatatccaaaccaggacggcgcaggcctatttctgaggtctctttggttaaaagacattaccctggcttggcaggtatacgtcacagaggtgagaatattattgagtatgacttgggcatgccatttcgcaccacatttgaatacgaagccccaacagtgtccccagcgttacaatcagtattagaagatgctttacaaccagaaggagatttagaaatcacttcaccccgtcaaccgtcttcagactgcccaaatcatgaaaagacctagt

SEQ ID NO: 361 - DNA, 426 bp, Ctenocephalides felis
cttgatagaagaatttattattaatacatattatatatattgaatatagaaagcaaatctattataaaaatattaatgcacttatgtcaatagtttcatatagtattgccaggaaaagctaagtattaagtataatatatttagttattcttaaacatatgttgttgttgttttgataaagctgtgtcttaaaatgactttatatacagcaattatcttcaataatcctttccacaattttgctcggtgtgttttagtttgctcaaatctatgggtgtattgttttccacatatgtcttaatttctttcatcaattccgatgatgggttttgctcacgtgtgagaatccaagctaattccatttttcctcgtggatgaattgtgcagctccacacaatagcaaatttatcaaaatcgctttttagt

SEQ ID NO: 362 - DNA, 420 bp, Ctenocephalides felis
ctgaattccagatgtagtgaagtaaggaatctcaaatttcacttgtattgggggttttccttccgtatcttcacattccacacttggcaatccaaaatgtgctctcattaggtattctttaccacctggaaatgattttatggaccaagtaaatgcattcaaatcaggagcatatttaacacttccaattgttgttttaaacttcggggaatctgcatcagctggtacaggaatcagtatctccacattatttgcagttgaccgtcttttaaattgtgacttagctttgatcatgtattctacacggctgtgtgcgtgcctttcaattactgattcaatccatatcaagggttttacatgtgtgttaagtcgataagacattaactcaaactctccatcaggaggaataaatgatatggt

SEQ ID NO: 363 - DNA, 218 bp, Ctenocephalides felis
  misc_feature (12)..(12): n = unknown
  misc_feature (70)..(70): n = unknown
  misc_feature (74)..(74): n = unknown
  misc_feature (87)..(87): n = unknown
  misc_feature (108)..(108): n = unknown
  misc_feature (125)..(125): n = unknown
  misc_feature (129)..(129): n = unknown
  misc_feature (157)..(157): n = unknown
  misc_feature (160)..(160): n = unknown
  misc_feature (163)..(163): n = unknown
  misc_feature (206)..(206): n = unknown
cctggtggtttntggtagtgggggttttggtggttctaatgggaggatttggtggaggattttggcttangggntgggaatcggganggttccattggtttcattcangtttgaacttggagcanttgnggatgggcttatttcatcattcgttgantgnggntgggcgtctttaacgtcactggtaaataaacgcctgggcccanggtcaagtctgt

SEQ ID NO: 364 - DNA, 432 bp, Ctenocephalides felis
  misc_feature (410)..(410): n = unknown
  misc_feature (425)..(425): n = unknown
attccaaatatcactataagagctaaatagccttccgtcaggtctccattattaacctggtcgaccacaaaataaatattgattgcaattactaaaatcgatagaaggattgcaacgactgaattaaccgctccattaacgaattctcccatgatagcagcattgctggtaaacgctatagtcggtagggtcgcaaaaggtagttgtaaggacatcactgcattcagaaggtcgttcatacccgataggtcttcgatgctattgaaaaatgccatcagaaatgttggtatgatggcaatcattcgggtgaataggatcctcttccagcgagaccattgtaggttgaggaaaccctccatggcgaattgaccagcacaagtcccagtcattgtagaactttgaccggctgncaatatttcgacagnccaaatg

SEQ ID NO: 365 - DNA, 390 bp, Ctenocephalides felis
aaatctccgccctgcaatcttccccaaaccaaccaaccgatcaaataggaagccaactccaagctgtccaagttctcccaacaaacctcggtttgcacacacacagacaccaaaacaactatgctgtaccccaacaaaccaactttggatcctttcaccatcaccaacaaatcgcacccacaaatattgggggctactactccccccacggaattctaccaatctactacgataatgggcacggattgttgaattttaatcctttgaagcctcaaaactactacgcccagtattatccttactaccagaacacgagacagtattatccttacaattttggatattattatcatcacagtttgccgaattcgcactactacaggcagcagt

SEQ ID NO: 366 - DNA, 376 bp, Ctenocephalides felis
  misc_feature (49)..(50): n = unknown
aatacaagtgaactcctattgacttgggaaccaactgcaccagtaactnnagcaccagagctacatttgaccgaatatgtccttactgacatgtgggtaaatgaaacagttgtcaaggctgatttggatgacctgagacacggagcatttggtgggacatacagtgccttaagtttcacgattcaaataagtcgtgaaatgggttactatttaatggattactttttgccatcagtaatgatcgtgtcgtgttcctgggtaagtttttggctggcagcagaccaatcagcacccagagtcaccttaggcacaagcaccatgttgtcatttatcacattagcaagtacccaaggaaaaactttacccaaagtatcgt

SEQ ID NO: 367 - DNA, 377 bp, Ctenocephalides felis
  misc_feature (1)..(1): n = unknown
  misc_feature (64)..(64): n = unknown
  misc_feature (67)..(67): n = unknown
  misc_feature (140)..(140): n = unknown
  misc_feature (301)..(301): n = unknown
nctccacagttccctgcattgggccccattcttacatggcgatgggacacaagaaggtctacantcntttatgatttctgataaatgggttgacatataactataaatatccaatatttcaccattgacgaccaaaccgnggaagcagccgatcaacccttgctttatagttgatttttttagatgatccgccggagctcaccgatgaacatgctttcttcaaatggccaaactgctcctctgctccaaatcaaccatcatataatctgtatttatcatgaatctgcatgatattcgttgnaatcgatccaaattttatgccattctccgccatttaatttctatttgaatttatttcaatttcttctgacttcctg

SEQ ID NO: 368 - DNA, 498 bp, Ctenocephalides felis
  misc_feature (30)..(30): n = unknown
  misc_feature (57)..(58): n = unknown
atatatcttacatcgaatctaataacattnaagagttattaattttcatgtcgatgnnttagaaaatgattcagtagcaacttctgaattttctttgtaatcgataatactttctcaaagtataattgcatttcacaacacacgacggaaatatggttatggtccatatgaagcaatgctcgttcttctatccacttgcttctgataaatgttcggtataaagaatgcaatcactccacatgctatcagagatgttcctgatattaaaaatgttaaatcgcaattataatctagaattattcctacaacattgcttccaacaacacttcctaatcgacccatcattaaagatatacatactgccattgccctgagttgtgtagggtacagatctactaatgccgcgtttaccactgtcacagcaattccgcaaaccagcaaccacaaatataaatatgatgctattgttaaatgttcaataaatgcacaaattattcc

SEQ ID NO: 369 - DNA, 549 bp, Ctenocephalides felis
aacaaaacggtttaattgaatctgtagtttggaaattaataaatatggacagtaacacggggattcaaataatagcttccaaagaaccaaaaccaaggcagtttgaagatgcgttggcactcacaggttttggaaaattcaattaccttcttctggtcgtgagtggatgcgtattagtatgtgttttgatggaaactcttggaatgagttttgtcgttccttcagcacaatgtgatctggaattaacaacaaaacaaaaaggaatattaagcgctatagcttttataggtattataagcagttcacatttatggggatttttagccgatacgagagggaggcggaaagtgattatgcctacacttcttcttgcatttttttgtaccttggcatctagttttgtaaattcagtttggctgttattttgctgcgatatttcaatggatttttcgtatctggaggaagtgcacaatatatgcatatttaggagaattcataatcctaggcatcgcacagggctattatggggcgtcaagcatcttcgatttg

SEQ ID NO: 370 - DNA, 498 bp, Ctenocephalides felis
  misc_feature (28)..(28): n = unknown
  misc_feature (266)..(266): n = unknown
  misc_feature (451)..(451): n = unknown
  misc_feature (454)..(454): n = unknown
  misc_feature (472)..(472): n = unknown
  misc_feature (478)..(478): n = unknown
cctttaagattcgatgataatatacaancggccacagtggctgattatggacaacaaccactcgctggcacatcagcagtagtcgcaggatgggaaagattcgagacaggactagacatggcaggtgatttgagaaaaatcaacgtttcaatagtcgacgagtttgattgcttcctattttacatagaagaacaagaatttacaaaatatcagctttgtgcctcctcttctaaaaaacatatgggcgcttgtaaaggtgatattgnatcaccattagccgtagatggtcttatagtcggattatattcttggtcaggaaaatgtggcgaccccgagaaaccagaagtttattcaaatttagctgaatatttcatgtggatcgaccattctataaaaatattcacctaatttaataactatatgctttgcaatcatttatttatttgacctnggncgggacacccttagccgnatttgnagatattcatcacacttggg

SEQ ID NO: 371 - DNA, 549 bp, Ctenocephalides felis
tataaattgtatatatgagcaatgaatcaatttttttaaacattttgattttcctgggccctgtagcaaacttgatatttgacaactgaaccatcaaagctatatataaatattaatcgaatttctataaatcttaaatacatattttgaattaaagatagtaaattaacaatggcagcgggggctgagcctttgtcactagctaaagatgtcaaaagagcctgcgagctccttgataaattacaaatgactggagaaataccagccacaaaaatagctgccttacaaaaagttttacaatccgatttttttactgccgttcgcgaagtttatgaacatatttatgaaacagtagatattcaaggttctgaagacataagagcatcagcaacagcaaaggctactgttgcagcttttgcagccagtgaggccatgccatccacgagttgttgaattcctaagacagatgaaggcttagggtttaatgtatgggtggaaaagaacaaaattctccatatcatatcaagaatatccagtggtgagctgtcg

SEQ ID NO: 372 - DNA, 549 bp, Ctenocephalides felis
  misc_feature (474)..(474): n = unknown
  misc_feature (485)..(485): n = unknown
  misc_feature (515)..(515): n = unknown
  misc_feature (517)..(517): n = unknown
  misc_feature (532)..(532): n = unknown
gcttatgtttgtttttattttgacgttgctaaaattttagctttaatgtttgttttcttgtgataaattagttttattttaaaggctagcgcataataataatgatgcatctgagcgctgacatatctagtgcacttcagcaacttgagagcatcaagacagcaatagatgactcccatgatccaaaacttcagctcagtactaatgaagatttggatatgataataagcctattgcaagatccagtttttcgaagcattgttactactcaagattcactaggtgaattgaattcccaaataacacaacatccatcaatattaccaggagattttgatataactacttcaggtgatctaattctgcggtgcccccttctcttgatttatatgataatgagtacactgatgaacaaagagtaccctctgacaattaagtccaggtagccctcagaggttaggtatagcatcggtnggggcagtcangggaacattacattcatgaagggatcaatntngcaatgaggcaaccntgatggatattcccaca

SEQ ID NO: 373 - DNA, 549 bp, Ctenocephalides felis
  misc_feature (480)..(480): n = unknown
gcaaaatatgatcaatactgtatatttaacatacacgcgcacatatgcatatatatatgtatatatatatatatatatatatatacttatatgcatataaagcaatatcaacatctatttagttttcgatattctgcaaataataatgatcttaaattacaaatagaatattacatttaacagctaagaatttgcagtttcacaaatactgccagtcaccaaatggtattcagaatatcattcaaaacaatttagccaataatgtaagatgaaatacagatgattatagaaacattcagaatttatacactataaatatgaacattaatactatgtaccacttaaaatgtgaaatctgaatacgtcatttgatgactgcgtgtaacaagaacttgttatagattataacaattataatttaatatatctttttcattttgtaaccccaaaagagcattcctcgcgtcttgcacgacttgnggggtgtggtagtgtgatgatgatcatgtagatggtgatccttatatcacggttgggtgacgagattat

SEQ ID NO: 374 - DNA, 549 bp, Ctenocephalides felis
  misc_feature (388)..(388): n = unknown
  misc_feature (401)..(401): n = unknown
atcaaacaaagaaaatgaaaaccagtgttgtaaaacatgaaactgaggatactataaaaagtgaacaaagcgatcaatcaattattgaaatagatgattaataatttggaaaactatttgaagacgatgtaacaatataagatttgtgacgttgaatcacatatatgtcggtaaatgatgttttcctgtttcggaaaaactcaactagtatttatttgccatcatttacaaagccgtgggaatagctaaacctaatagagtctccattccatttgtaagcaatttatacatacccacatatatatgcaaatatatatatatatatatatatatatatatatatatatatatattatttttaaatgctggaccatgtttcttctaaatntgagtttaatgtngcattctttcgatatcgaatcattagttttatgtttttataaggtgtataattatttcataagactgtcactggagaaatatgttatttattaatttaatattaattaaatatatacattacccactatgtataaatgttcataaatc

SEQ ID NO: 375 - DNA, 549 bp, Ctenocephalides felis
  misc_feature (547)..(547): n = unknown
cttaggaattgtggcagcaagtccagccatatatagtgcatttacacattgtattcgcaaatcgtattagtgtgtaagttctgtattttttttctatatttgaattattaggaatgatcaccaacattgtgtatattcatgtcaaatatattgaaaatgttctatttagatgtgaaacttgacatgatttaatttaatttaaatatgtattttactttgttcatgataaaggcatttatatttaaaaaaatatattttactatgtgtatgtaagtatacatgtacatgcatacatacatatatatatatatatatatatatatatatatatgatggtagaggcttggatttgtaaatattttgaagagcttcgaacaaagaatccaaaggtaataaaaaaccacaaagtttgttgaaacaatttttttatttactgtcgcgtttcggaactaagtatggtcacctgcaggacattgcaagaacatcatcttaaacaagcaatatacttagtagaataaaatgctggattttataaatgacaaattgnga

SEQ ID NO: 376 - DNA, 498 bp, Ctenocephalides felis
atggaatagtgctaaccaaagcaaagataaaccaatctcgcgtcgcccacatcagtaacggcataagaatcattccactggtccacccgatggactgcatcatggcaatgtgtgctctatcttcacttctggatatttccatcgcaattatcaaagggctttgaaaaacagatgtagatgttagtgaaccaagaaaagccgctgttataaaaacaataaaccaactggaagtaaatgctgtaattagtcttccggtgacgattgtgatgagacttaagtaaaatactggtcttcttccaatcctatctcctaattgtccaaaaataaatgtgcctatgacttcgcctgcacgtccaatagcaaatgtattagttacatagagttctctatcacaaacccagtcttgatctgacggagccgttgataaatacatgttctgtcatattcataaccatgctgacaaggtattatttgactttcaatcttatttgtctcttc

SEQ ID NO: 377 - DNA, 598 bp, Ctenocephalides felis
  misc_feature (460)..(460): n = unknown
  misc_feature (483)..(483): n = unknown
agtaagaagtaacttaaaccgcaaacgacccagcatatcaataacattattgtgttcttggcgagcgtccagcttgtgaacaaactcatcattccaaaaacatgttcaggttcagacgaataatcttttagcatttctaatgcatcatcattcaatgttgcaccattaactttggcaattgtgcgtaaagttttttcacatttcttcatttttcctctgcttgctagccatcttggtgattcaatcatatatttgttattaattaaaaatattgcaaatggcaatgaagaaactagaacaaaatcaaaccaatttctcaaccaccacatcaaaagaggcattgtgcaaattccaaacgtccacccaattccttgtaacatagcgacgtgtgagttttcatcacttgtcgatatttccattcctatgacaagaacagtctggtatagagacatctgcgggnagtgcagtcaccacatatccaantacataccaataatatgaactagtgagaaataagttaaatatttttcctacataatcaacaccatgctgagaaaaaatactggttccttccaatacatccctaattgtcaaatac

SEQ ID NO: 378 - DNA, 498 bp, Ctenocephalides felis
  misc_feature (30)..(30): n = unknown
  misc_feature (58)..(58): n = unknown
cttggcatctagttttgtaaattcagtttngctgtttattttgctgcgatatttcaanggatttttcgtatctggaggaagtgcaacaatatatgcatatttaggagaatttcataatcctaggcatcgcagcagggctattatgggagcgtcaagcatcttcggatttgcgtgtcttgcattaccgacggttgcatggttaattataaatcagaaatggtcattctatattgactttttgggatatacatacaagccctggaggttgtatatggttgcatgtggtttgccatcactgctttgttgttttgctttgtggaaattaccagaaagtcccaaatttttgatgaatcagggaagaaacgaagaagctcgtcaaattattgccaaaatgtatagaattaatactggtaaaccagaaagtgaattccccgtatcatcaatcttagatgaatatccaggagtggatggtgaaaatacaaataaaacaaagaaatc

SEQ ID NO: 379 - DNA, 451 bp, Ctenocephalides felis
ttctgttcgaagtaggaaatagttcgagtgtatgcaaaataactactgcaaatactgcactcatgaataaacgaccaataagtgaaattaccattaatgtataagcataatctaaactgaaagatagaattggtatgaaacacgccgtagcagacataaataatagaaagtttatagttcggcgtccacaaaatttcagtagcggcaaaggtatgaaataacttatacactcaagcgattcactcataatgccgtatatcattttttcgacaggcaaattaatatcgtttattgccatagcatagtaaccgagagcacttgaaaaccaagtaacaaggcaaataagtaatctatgtctcatttctgtatgcttaagtatatcagttatctccacaaaactatttttaactttctgccagcaagatggttttttaccaccatctgcttgagt

SEQ ID NO: 380 - DNA, 401 bp, Ctenocephalides felis
agtccactcaataaagtagcgacacctcccatcgtcagtgttatgttattaatccataaaacatttacgctagtatttgaagccaaaaccccgcatatcaccctagtcaatgtgttagatataccaatagttgataacaaccaagctgtttcatcatcggtcattccgctggttttgtttctctgagcaatatataggaatggtattaagtaacccatcatagtaaagaaaccactgaaggcgagcaaaaggaatgacggcgaacgcatcaagttcatatctaacatggtagcgagagttcgacggaacgcttctgggcaaagcttgcaagaagactgttcttcgacatccgcccgagtaggtaatctagttacggacatgtggtatccaatagaagtcgt

SEQ ID NO: 381 - DNA, 498 bp, Ctenocephalides felis
ggccctggacaagatgcccttcgactcaccaccgaatatggagctgtctacgatcaaaatgccaccattgaagttcttaataaacagaagaggaaaactttgtgccacactgatggcgaaggagttgaatgcgaaacagaagaagggagcatcgcacctcaaataatactatttgttgcccaattaatttctggagtcggtggatctttatactacactttaggtgtatcctatatggacgataacaccaaaaaatctaaaacaccagcactgatgagtttttcttattttcttcgtatgctcggacctgcaaccggttatgccttggctagcgtctgtctaaagttctacatttcgccaacgttgacgccaacaattgataataatgatcctagatggttaggagcatggtggttaggttggttgatactaggatcaactttaatattttttgcaacgttgattggattgtttcctaaaatctgccaagagctgcaa

SEQ ID NO: 382 - DNA, 461 bp, Ctenocephalides felis
atgaatccaattcggcaaggagcaatcacttcatcatttgaatgcccatcgtgatgctgggtcttccatacagaattcacagttgtatttttaccctcaggacaaccttcagtcgacatatttaggtaagggaatttcaaattcccttgagcaatgttaatttgggctccacttaccatccaactgaccaggattagacttgcagctgctcccaccaaaactcccttagtgtttgctttagggaacaagattcccaatgtaaacattcccaaaagtgttcctgcagttacaccagtaacactgatgacaaggtgcatgacgcttcctaattgttctactacgaagacaagccccagacaaattcctccaattactactacagtcaacttcataatattactggcagtcttctcagtagtgctaaccggtaaccactccttaataaaatcttcataaagtgt

SEQ ID NO: 383 - DNA, 498 bp, Ctenocephalides felis
aataaatataattttattatataagaaacatatgtataacaatacaaattataactatttaacagtcttcttgtgataatttcttgacggccgtatctgtagactttgatacaccttttttcggtaagctccagaacacctgatccctgccgaatacgtgagcttcagttagcgtttccggtaacttttggtgtaaagtttccggcaagaacattccggaagtcgcgcccaccatcatcattacggaaagtacagcgtacggatatctggcgtcatatgtggttcccaagtatacaatgtatgggcctaatactcctaatgcatttgaaactatagttccaatggaaattcctgtctgcctcaaacaggttggatatgttttcattgcttgcagattcacaacataaaacgtgatgcttatgcaaaatttcattaccacggctaacagtgggaccaaattctggagggattcatcattggcaatgcatataagaatgg

SEQ ID NO: 384 - DNA, 500 bp, Ctenocephalides felis
  misc_feature (4)..(6): n = unknown
  misc_feature (8)..(10): n = unknown
  misc_feature (14)..(14): n = unknown
  misc_feature (21)..(21): n = unknown
  misc_feature (23)..(23): n = unknown
  misc_feature (30)..(30): n = unknown
  misc_feature (34)..(34): n = unknown
  misc_feature (36)..(36): n = unknown
  misc_feature (47)..(47): n = unknown
  misc_feature (51)..(51): n = unknown
  misc_feature (71)..(74): n = unknown
atcnnncnnnatangtggatncnaagaatnctangnatgggcctaanactnctaatgcatttgaaactatnnnnccaatggaaattcctgtctacctcaaactggttggatatgtttccattgcttgcagattcacaacataaaacgtaatgcttatgcaaaatttcattaccacggctaacagtgataccaaattctggagggattcatcattggcaatgcatataagaatggaagatgctgccagagcaattccaaaagaagctacagaggtccaacgtcttcctattctgtcgctggagaaacgtcctagtagatatgctggtaattctactgccgattgatataaaaagttgagaaatggattacctcccatattgctcacgttcaaaattaatgtaaaatacgtcacggaacatacaatccagcaaagcacaataagtgtagtatttctagctaaacgtaaactagaaaataaactcatgattccgtaaactttt

SEQ ID NO: 385 - DNA, 498 bp, Ctenocephalides felis
  misc_feature (482)..(482): n = unknown
  misc_feature (493)..(493): n = unknown
cattaaagaagtatctttaggaccaacaagtttagctgctctgatggttttggaatattgtcatgaaaaaccagtcgaatatgtagttttactaggctttttagctggttgcattgaacttatgatgggattactgaaacttggatttttagtcgatttcataagtgccccaatcgtatcgggttttacatccgcgatgtcgttaataattatttgtgcgcaggcaaaaggtttgctagggctgcattatacaggacatggatttgtggatacattgatgcagctaatacaaaggatatcaaatgcgagattagctgattctatacttgccttatgctgtatagtttttcttttaacattaaggcaaataaaagatttgaaagtctccagtcctgttttaaaaagaaccttatggtttatttcaactggaagaaatgccttgatcggtttaattacagcgttgcggcttacttttgggaaangaattcttggnaagcc

SEQ ID NO: 386 - DNA, 498 bp, Ctenocephalides felis
  misc_feature (51)..(51): n = unknown
  misc_feature (108)..(108): n = unknown
aatatttttaattcataatatgtatatgattgaatcgccaagatggttggnggagtcgatgtaaaatagaacgatgtgaaaatacattaaaaatcatttccagcgtanataagacaactcttaatgaagatgcaattagagtgttaagagaaaaatcctcaggaaaaccagaaaaagtttacggaatcatgagtttattttctagtttacgtttagctagaaatactacacttattgtgctttgctggattgtatgttccgtgacgtattttacattaattttgaacgtgagcaatatgggaggtaatccatttctcaactttttatatcaatcggcagtagaattaccagcatatctactaggacgtttctccagcgacagaataggaagacgttggacctctgtagcttcttttggaattgctctggcagcatcttcattcttatatgcattgccaatgatgaatccctccagaatttggtcccactgtagccgcg

SEQ ID NO: 387 - DNA, 396 bp, Ctenocephalides felis
  misc_feature (387)..(388): n = unknown
atggattcatgtgcctttacctttagtatttgccgaatatttttcacaggagagatttccttcagcatacggactgttcatgttcttgcaaggaataatgacattggctttgggtccaattgttggatttattcgagatgcaacacacagctacataatatgtttccatgccttgactgtgtgtttactcatttgctgtataccatggcttgccgagatggcgtggttaaaaatgaaaaataagaaataaatttaagaattaagttaatattaatggaaaaattatatatagtttatgtgaattttatcacacgtgttatatatctttataaaagtaatttataaaggattgtcacagaaaatataaatgacaaaaaaaatgttttnnaaaaaaaa

SEQ ID NO: 388 - DNA, 203 bp, Ctenocephalides felis
agagaacattcggaagtgaagatgcctgtgaacaagcatgatggataccaaatggacttggacagtattttgaaagagttgggacattttggaaaatttcaacttctgaattgcctgtttatttgcattacaatattgctatttgctatgtatgcgatgagctatgtgttcacagcgggagtagttaatcatagatgtttagt

SEQ ID NO: 389 - DNA, 549 bp, Ctenocephalides felis
  misc_feature (4)..(5): n = unknown
  misc_feature (541)..(541): n = unknown
gtcnntcggtcagtcggtcttgactcgccgtacaagatagtgattcgttttagtgcgggtgtttttgttgttgaacttatgtgccttttacttaaacttttcaaatttattcaatttcatcaagtttttgatttcgactgtgacgtacctttaacaaatactaaaaatttgaaaagataaaaaattgaaatcgaacaaaataaattaaagtacaaaaaatggagaaagatatggaaaataatgaggaccaaaaagagatcaaaatggaatccggcgaagaaagcatgcgaccagttttaaacacacctgatccagtcgcgactgccacagtaatagttcctcctgatggaggatggggctgggtcatagtagccgcatcattcatgagcaacatgatagtggacggtattgtgttctgatcggaccaataattgaagagatcaaatttcatttggtgcaagtaagctaaagtagcccttatcagttcgctgtctccggattctatctgatggtggtcttttgtagtggcttgcgaatcgantgggttcc

SEQ ID NO: 390 - DNA, 549 bp, Ctenocephalides felis
gcctgtggtaggtcccaggagcaaggagtggaaatgttgcttctgtctccacgttcggactgcaacaatatgtcttggcatttggcatttgatgctgcacttggttgcactatgtgttcttgtgataattttgcattctccgaacctgataaaccaattggagcacccagatcaatcaatgatgggtgtaggtgttggttctatttctcgttataacggagacaatagcttgttaaacaaggttgatgataatggaacacctttgggagaaatggagcatcctccatatgcatatagagaccactcacttacatatcatgatgtggacatgggtgctctggttacaatttgtacactggccataacattaatgatgttatatggagcagttaaacaaaagcctgcacatattttgccattcttctgcttgcaactatttgattttgcataactacacttactgcacaggatatttggttatttgcgcagtgtcatagattgtatcagaaagtcgcattaccaatgagagaagacttttgaactaaccca

SEQ ID NO: 391 - DNA, 304 bp, Ctenocephalides felis
cattgtggatgaggcaaatcccatataccatgatgaagtttgcttgtttcgaaagaacagttgaattgttatacactcatgtggttcccaaacccagagcagaatgcactaaaggtgaacaattggttgtcacctttgctgctggttacattgccggtgtattctgtgcagtagtttctcatcctgcagacacagttgtttccaagctaaatcaagacaaaggagcaacagccattgacgctgcaaaaaacttggctttgctggtttatggaagggattaggacctaggatcatcatgattggt

SEQ ID NO: 392 - DNA, 229 bp, Ctenocephalides felis
cgtggttttggagtatctgttcaaggtatcatcatctaccgtgcagcatactttggattctatgacaccgctcgtggaatgttgccagaccccaagaacaccccattagttatcagctgggccattgcacaagccgtcacaactgttgctggtattgtgtcatatccattcgacactgtccgtaggcgtatgatgatgcagtctggacgtgcaaagtctgaaatgttgt

SEQ ID NO: 393 - DNA, 408 bp, Ctenocephalides felis
gaaaaatggcaactgctgtttgttgcataggacaaggcattttcatggcaggtttagcattctctggtaatgatcacatcgcggctattgtgttcatgactctggcgactgcagttaatggagccgtttcaactgggccattagccagctttgtggatttgagtcccaattatgccagtattacgctgggattgagtggtatgatttctgtaatgcctggttttatttcgcctgctatcgttggtatactaacatttgaaaaccaaacgatagagcaatggcagaaagttttcctcctagcgacagcaatgttggtcgtttgtggtcttttatatttggtgtttgcggactctaatctacaatcctggaacagtccagataaaatcgttcaagatccgaagaaattgt

SEQ ID NO: 394 - DNA, 129 bp, Ctenocephalides felis
aagcaagttttcttgggtggagttgacaagaagacccaattctggcgttacttcgcaggaaacttggcatctggtggtgctgctggagccacatcattgtgcttcgtctacccacttgatttcgcccgt

SEQ ID NO: 395 - DNA, 427 bp, Ctenocephalides felis
catgattggccgctgatgtaggtaaaggcgctggtcaacgtgaattctctggattgggcaactgcttgaccaaaatcttcaagtctgatggtctccctggattgtaccgtggttttggagtatctgttcaaggtatcatcatctaccgtgcagcatactttggattctatgacaccgctcgtggaatgttgccagaccccaagaacaccccattagttatcagctgggccattgcacaagccgtcacaactgttgctggtattgtgtcatatccattcgacactgtccgtaggcgtatgatgatgcagtctggacgtgcaaagtctgaaatgttgtacaagggaacactgcactgctgggccaccattgccaagacagaatgaagtggtgccttcttcaagggagctttctccaatatcctccgtgg

SEQ ID NO: 396 - DNA, 498 bp, Ctenocephalides felis
atccaagaaactttaaaatgcacatctagggaaactgatttaccaccaacaccatggtgggcaatttggacatctgttccattgtgggcacttatttgcgcccagattggacacgattggggtttcttcacaatggtaacagatcttccaaaatacatgaacgatattttgaagttcaacatttctgaaaatggattatattctgctcttccatatgtcgtcatgtggatcgtgtcgattttatcagcaatttggtgcgatcatatgttgaagaaaaagatgttgagtgtcaccaatgccaggaaattattcacaacgatagcatctgttggtccagcttgttttattattggagcatcatttgctggttgtgataaaactcttgttgttgccttgttcaccattggaatgggtttcatgggaactttctacgccggtatgaaaattaacgcattagatttaagtccaaattatgccggtcattgatggccattgcaa

SEQ ID NO: 397 - DNA, 305 bp, Ctenocephalides felis
caatcatgatgatcctaggtcctaatcccttccataaaccagcaaagccaagttttttggcagcgtcaatggctgttgctcctttgtcttgatttagcttggaaacaactgtgtctgcaggatgagaaactactgcacagaatacaccggcaatgtaaccagcagcaaaggtgacaaccaattgttcacctttagtgcattctgctctgggtttgggaaccacatgagtgtataacaattcaactgttctttcgaaacaagcaaacttcatcatggtatatgggatttgcctcatccacaatggt

SEQ ID NO: 398 - DNA, 342 bp, Ctenocephalides felis
aatactttgaatacttcataaagaccgaatttgcaaagaccctgcatggagtatccaacaaaggttggagcccaacctttagcaagacctctagcaccatcttccgctagagttactttgaatccattgaatactgatttgtattttgcaggatctacttgaatacggcatttcactaaatcaagtggaacgaccatggtgtgtgttacaccgcaagaaataattcctccaaatccgcaaagagcaaagtaatgaccagatccaaaggcacaggaatctcctgttgcatctgaggtggaggctgccattgttgccaatgatttagattcagcttcacattgt

SEQ ID NO: 399 - DNA, 500 bp, Ctenocephalides felis
tttttttttttttttttttttttttttttattattgaaattcatttattgaatataattaaaatttcacatatttatattcataattttactacatttctaagccttcattataatacccgttgcctgcagctccactagttttacttgcattagaattaatattgtttggataatcgtcatttttaatacttgtatttgtattagttaaatttttggcccatggctgcacttcgccggatgcaaaaaaccaatatatcacagctcctaacaaatatattccacttgaaatgtaaaatacaatttgccacgatgtgagtaaatcatctccaacctttccattaacaatgaaaccagtcaattgagggctgattattcctggcaatgttgcaaaagtatttgacaatcccatcagaacgctagcatattgtggtgcgatgtccaaatgatttacactgaatccagaccaagcaaaagcgcccaaacccacagcgactgcag

SEQ ID NO: 400 - DNA, 383 bp, Ctenocephalides felis
cgctgcccaatggtttatttatgatgccgtcaaagtctggttgcgtatgccacgaccaccaccaccagagatgccagaatctctcaagaagaaattagctgcccaacagtaaaaatagatctgtgatgatcctctcaataatgcatgtatcagcaatattacaattgaaattgcaactaacatctaaaatagcagtatcagtgatggactattcaatttagtaacaatgctgtctaactggatcacgtttttcattccaaattttaattttaaatgaaataggcaattataatagtattacaatttcttttaacaaatttgtgaaaaacgtttctggttgatgtgtaaataaaacaaaaaaaaaaaaaaaaaaaaaaaaaaaa

SEQ ID NO: 401 - DNA, 188 bp, Ctenocephalides felis
  misc_feature (33)..(33): n = unknown
taagcccttatagaatccattaagtccttcatncttatagattttgggaactgcttcacgcatggtgttagcaaatccaggcatagtctggatacgaactttagcagcttccatgggagctaaagcaatgtcagcaaagaattctgcactagcagaagccgacaagtaaagcgatgtcctccataagt

SEQ ID NO: 402 - DNA, 500 bp, Ctenocephalides felis
  misc_feature (58)..(58): n = unknown
  misc_feature (171)..(171): n = unknown
  misc_feature (390)..(390): n = unknown
  misc_feature (424)..(424): n = unknown
  misc_feature (456)..(456): n = unknown
  misc_feature (461)..(461): n = unknown
  misc_feature (476)..(476): n = unknown
  misc_feature (482)..(482): n = unknown
  misc_feature (491)..(491): n = unknown
  misc_feature (493)..(493): n = unknown
ttttttttttttttttttttttttttttttggttatataaaaatatttgtactatagntagttctaaatatacatttgttcacaataatataaatattatataatcatttgtaaaaaaaattaatataaaaatctatacaaatatttatgttataaattactataacaacngttacaatgaaagaaaaaaatagcactactatacacaaagtctttggttatatgaaaaatatttaaattcaatctaattaattttttgcttttgcatgatgtaagattttaccatgccttttatatcagtgaatataaaagtgcctataaatacaagtgcagtaccgatccaatgtatgattgtaaattcattattaaaatatacaatagagaacaatnatgacacaaattttctaagtgtaataactaaggncactgttaatgatgaacattctgtagtcagcncatcnctgggcttttgcccnggtttngggttattncntttcccg

SEQ ID NO: 403 - DNA, 487 bp, Ctenocephalides felis
  misc_feature (58)..(59): n = unknown
attattacttttataaaaatataaatctatggatatctatataagggagaggtgtggnnaacctacatgattaaagtatcacttttatttaattaattagctattatgtataggtaattctatttagttttgtttaattaattaattactcagccttgcttattattatcgatttcgatacggaaagccaaatcctgcatcgagtcgtgctttagaagggacttcttttcgggatctttaacttttctgattggttttttgtttttaccatatctatttgtaacaccatcatcctcgtccatcatccttaaaatagttaattgatccgatgaatctaagggggccacagaaatatcacgaacggctctgaatttaccacaattattcaaatgttcgttttccaaacggaagaaattccatacaaacctcctaaacacttccaatggtgacagtatagatgtaagaatgtccccgctcacaaaattgt

SEQ ID NO: 404 - DNA, 343 bp, Ctenocephalides felis
tttttatgctgatttagggttaattaaattagcagaagacatagagtttagtgataaggtgcaagctgtaaacattcaccaaagtgaaatccaaggtggtgaggaatgcaaagcaactggatggggtcgattgggtgccagtcaaccaataccaaatgcgttgcaacagttggcaaccactgctttaagtaatgagaagtgtaaagaagttactggattcttcgagcccacatcgcaaatatgtgtattcaaaggatctggaaaaggagtttgttttggcgattctggtggacctttagtttacaatggagaacaagttggagttgcatcatttatattgggt

SEQ ID NO: 405 - DNA, 387 bp, Ctenocephalides felis
  misc_feature (1)..(1): n = unknown
  misc_feature (9)..(9): n = unknown
  misc_feature (18)..(18): n = unknown
  misc_feature (26)..(26): n = unknown
  misc_feature (35)..(35): n = unknown
  misc_feature (43)..(43): n = unknown
  misc_feature (57)..(57): n = unknown
  misc_feature (59)..(59): n = unknown
  misc_feature (65)..(65): n = unknown
  misc_feature (67)..(67): n = unknown
  misc_feature (72)..(72): n = unknown
  misc_feature (80)..(80): n = unknown
  misc_feature (94)..(94): n = unknown
  misc_feature (104)..(104): n = unknown
  misc_feature (107)..(107): n = unknown
  misc_feature (109)..(109): n = unknown
  misc_feature (111)..(111): n = unknown
  misc_feature (118)..(118): n = unknown
  misc_feature (121)..(121): n = unknown
  misc_feature (123)..(123): n = unknown
  misc_feature (126)..(126): n = unknown
  misc_feature (132)..(132): n = unknown
  misc_feature (137)..(137): n = unknown
  misc_feature (144)..(144): n = unknown
  misc_feature (148)..(148): n = unknown
  misc_feature (162)..(162): n = unknown
  misc_feature (165)..(165): n = unknown
  misc_feature (167)..(167): n = unknown
  misc_feature (170)..(170): n = unknown
  misc_feature (175)..(175): n = unknown
  misc_feature (177)..(177): n = unknown
  misc_feature (182)..(182): n = unknown
  misc_feature (200)..(200): n = unknown
  misc_feature (204)..(204): n = unknown
  misc_feature (207)..(207): n = unknown
  misc_feature (225)..(225): n = unknown
  misc_feature (231)..(231): n = unknown
  misc_feature (238)..(238): n = unknown
  misc_feature (242)..(242): n = unknown
  misc_feature (247)..(247): n = unknown
  misc_feature (255)..(255): n = unknown
  misc_feature (261)..(261): n = unknown
  misc_feature (266)..(266): n = unknown
  misc_feature (274)..(274): n = unknown
  misc_feature (283)..(283): n = unknown
  misc_feature (294)..(294): n = unknown
  misc_feature (314)..(314): n = unknown
  misc_feature (317)..(317): n = unknown
  misc_feature (323)..(323): n = unknown
  misc_feature (329)..(329): n = unknown
  misc_feature (333)..(333): n = unknown
  misc_feature (348)..(348): n = unknown
ntgtcaacnatttgcaantatttggnaatttggcnaccattanataattacccccancnacccanantgganacggcccnaattggggtaccanaccttgccanacnancnggtttgncananttngtgtanacaanatttgangtantttttaccaaaccnatntnatngtggnangtgtncgggttaaattggttatnaacnatnatttgggcaactttgtanccaacnccgccancatncaaantgttggtnccaacnacaanaagaatancatttgganatttatttaanacccaattaccaccattaanaanccaacnattgcngatnatggaaccaccacanaattgtccttggttggttctcaaagacaccataaaaggt

SEQ ID NO: 406 - DNA, 127 bp, Ctenocephalides felis
aagagggccaccggagtctccagagcaagcgctaactccaccagtcaagggtccagtgcacaagtttgttgggtgcaatggagtagatccggctcctcctagagccttttcacactcggggtatggt

SEQ ID NO: 407 - DNA, 415 bp, Ctenocephalides felis
  misc_feature (398)..(400): n = unknown
cgaagggaacaactttgagtgtaactggatggggcgccacgaaggaatgggggccaatttcgccaaagttacaagaagttaaagttaaagcttactcaagtcaagaatgcaagaacagtcatgctattaacagtgacatcatttctgacagtatgatgtgcgctggttttcctcaaggacaaaaagatacttgtcatggggatagcggtgggccacttgtagatgaaaaacaggttcaagtaggagttatatcctggaggcgaggatgcgcgcgacctggatatcctggcgtatatacaaaattgagccacccggaaatccaacagtttattaaaaacaatgtaaaattttaaatcataaaactgtatgaataaacaattacgaaaaaaaaaaaaaannnaaaaaaaaaaaaaaa

SEQ ID NO: 408 - DNA, 445 bp, Ctenocephalides felis
  misc_feature (172)..(172): n = unknown
cccaggatacaatccctataagtttcctgtttttgtcaactaatggaccaccataatcaccgtgacaaaaaccgccaccttttgcagaaccagcacataacattctatcagtgattctgtctggttttcctggttctgcataattactttgacatactgaagaatctatcanaggaatccaagcaccaagtaattctgaagaatcgtttccttcggtctggttagctccccatcctgttacataaactaaagatcctacaggagtctcatattgctcattagctaaatttacaggtcgactattacacactgtaagtttaataggatttttaactttaaccagagcgacatcataatcaaaggtccttatattaaatttcggatgtaaaactatgtcggttacctcgtatacatttccatttgaattgtggtaggaacttcctgt

SEQ ID NO: 409 - DNA, 445 bp, Ctenocephalides felis
  misc_feature (428)..(428): n = unknown
aggaagttcctaccacaattcaaatggaaatgtatacgaagtaaccgacatagttttacatccgaaatttaatataaggacctttgactatgatgtcgctctggttaaagttaaaaatcctattaaacttacagtgtgtaatagtcgacctgtaaatttagctaatgagcaatatgagactcctgtaggatctttagtttatgtaacaggatggggagctaaccagaccgaaggaaacgattcttcagaattacttggtgcttggattcctctgatagattcttcagcatgtcaaagtaattatgcagaaccaggaaaaccagacagaatcactgatagaatgttatgtgctggttctgcaaaaggtgacggtttttgtcacggtgattatggtggtccattagttgacaaaaacaggaaacttatanggattgtatcctggggt

SEQ ID NO: 410 - DNA, 352 bp, Ctenocephalides felis
gacaatctaataagggccacatcatgttcgaaagatgtaaagttggtgtcaaagtcgggatgtaataaataaaaattggcatccacaattataccagcgtaataagccctaaagctgccaactcgaacttgaacttgtttttcgttgcggacatttttgaagcattgagcaacagtgagcacaaaatatctactaactatgactcctccacaaatatgatcacctctatataaaacagatgccacgtaaggtaattcgctgatgtcagcaggctttcctccgatcatacgagaatcggtcaaatttttgctttctgctccagaaaataatacaataaagaaaattgcaaagt

SEQ ID NO: 411 - DNA, 498 bp, Ctenocephalides felis
tggtatagaataaaatttttttataatcagaaattatcttcgctttaacttttgatgcatattattttatgagatatatttataataaatattttattcagaattgttcaataaaacattgtccgtgtttttgtgaatccagtccaagaagtgatatactcttgcatagacgtctggcactcctgtgccacatggaataccaaaagatactactctggcaacaactggtccatcaggttctcgaacgatcagaggaccaccggaatcacccatgcatacaccaatgcccagtttccggaaagcacacagcattgtttcagttatatcattttgtctagaaactttattcttgattggtccttgattgagaaatttttggcaaatgcgactttcgtatgagatacccatcattttttgtaaatgatctggtatttgaccaaatggagtagtttgtccccaaccagaaacttcaacagtctctccgccatggtatcttct

SEQ ID NO: 412 - DNA, 386 bp, Ctenocephalides felis
cttttatggtgtctttgagaaccaaccaaggacacttctgtggtggttccatcatcagcaatcgttggattcttactgctgctacttgcgtgttaaataaatatccaaatgatattcttctcgtcgttggaaccaacactttgaatgctggcggagtaggatacaaagttgcccaaataatcgttcataaccaatttaaccagaacacataccacaataacatcgctttgctaaaaactacatcaaatattgtatacacaaactatgtcaaaccagttggtctggcaagctatgatacaccaattggagcagtatccactctggctggatggggctacttatctaatggtggcaaattcccaactacttgcaaatcgttgacacgt

SEQ ID NO: 413 - DNA, 348 bp, Ctenocephalides felis
ctcatctacggtcaatggacctccagaatctccactgcattgtgctctgtcataatctggataagctgcgcaaatttgctctttataaatgggtctaaagtgcaaatcaccacattccttggatccgacgatctggtagtgcaattcttgcagatgtgtttgcaaaactccgtcggtagtagaatttattccccatccgacaagagtagctggtgcattgtgtttagtttgttcatttgcttctggcaaagtaactggttgcgcaaatttactatattttaagggttcagatagcttgagaagtgcaatgtcgttgatataactgttactaggattatatcctttgtg

SEQ ID NO: 414 - DNA, 147 bp, Ctenocephalides felis
cattgccatctaatgagtttgatcccatatagacggattttaaaatgccgggttttaggcaatgtgcagccgtcacaatccaacgtttgttcaagatggatccaccacagaaatgctctaggtctcgatttctcaatgaaacttggt

SEQ ID NO: 415 - DNA, 467 bp, Ctenocephalides felis
  misc_feature (69)..(69): n = unknown
  misc_feature (126)..(126): n = unknown
  misc_feature (415)..(415): n = unknown
  misc_feature (454)..(454): n = unknown
ctttacatattgcagttgttcggggtcgtcttcatcttcccctaaatttccccagccagtaacagtggntaattctcctgatggcatgtcttttccaacatcagtaagtttgactgttctaacagntctgttattcaaccggaatggtcttcgaaccttgatgagggcgacatccatatcgatgtcagttacattaccgtatgcaggatgcttgataatttgtgccacaggatgaacggaaccacgtcttccttggaaactggtgccgactcgaactgaatacgtgaattcatcatatatgcaatgagctgctgtgacaatccaataattattcaatattgaagctccacagaaatgttcgttaaatacttggagtgaagcttgatagccatatttggcaatatcagcatcttgnctccaacaatgcgcccatctaatccatcctttatcttgnaagatgagacggc

SEQ ID NO: 416 - DNA, 346 bp, Ctenocephalides felis
tcattacggtgtggaatggctcgtccctcatcctcgttatgatagccgcgatcaaaattacaatgtaggtttaattatgataacaaaggatttcaatgaaactagaagaagccgacctgccaagctcgtagaggcaaatgtcgacttgcctgtaggctcctttgtcacagctactggatggggatctgaaacgataccaggagcacctatgtcagaaaatcttagagcaatatctttgcacgtcattgataatcaagaatgtcttgaaaaaaatcaagagttgattgatgtcacagacaaaatgttttgtgctggatcaatagaagataaaggaaaatcagtttgt

SEQ ID NO: 417 - DNA, 312 bp, Ctenocephalides felis
  misc_feature (44)..(44): n = unknown
  misc_feature (59)..(59): n = unknown
  misc_feature (284)..(284): n = unknown
aattcttggctataagttcgttgcatgttttgcaagtgatttgnttattgcatttattnccgtggcatattttacatgaatcagagtttgcattacaatcgttaccctgatctgatttgcatcctcgagtaatgacacctttttcaatttttgaatagcagtcgcctttggattcatacaaactttggtcttcgtctttcctgcatctttgaaacattcgtttcttagttctggaagtttttgaacgttacaacccgatttctcgcaacacattttttctcggntagtcgagtcacaactttctttaaccgt

SEQ ID NO: 418 - DNA, 315 bp, Ctenocephalides felis
  misc_feature (21)..(21): n = unknown
  misc_feature (44)..(44): n = unknown
  misc_feature (63)..(63): n = unknown
  misc_feature (191)..(191): n = unknown
  misc_feature (306)..(306): n = unknown
  misc_feature (315)..(315): n = unknown
aattcttggctataagttcgntgcatgttttgcaagtgatttgnttattgcatttattcccgngggatattttacatgaatcaagagtttgcattacaatcgttaccctgatctgatttgcatcctcgagtaatgacacctttttcaatttttgaatagcaagtcgcctttggattcatacaaactttggncttcgtctttcctgcatctttgaaacattcgtttcttagttctggaaggttttgaacgttacaacccgatttctcgcaacacattttttcttgggtaggtcgagtcacaactttntttaaccgn

SEQ ID NO: 419 - DNA, 387 bp, Ctenocephalides felis
  misc_feature (8)..(9): n = unknown
  misc_feature (35)..(35): n = unknown
  misc_feature (38)..(38): n = unknown
  misc_feature (46)..(46): n = unknown
  misc_feature (51)..(51): n = unknown
  misc_feature (55)..(55): n = unknown
  misc_feature (59)..(59): n = unknown
  misc_feature (65)..(65): n = unknown
  misc_feature (78)..(78): n = unknown
  misc_feature (81)..(81): n = unknown
  misc_feature (95)..(95): n = unknown
  misc_feature (128)..(128): n = unknown
  misc_feature (143)..(143): n = unknown
  misc_feature (151)..(151): n = unknown
  misc_feature (214)..(215): n = unknown
  misc_feature (229)..(229): n = unknown
  misc_feature (298)..(298): n = unknown
  misc_feature (331)..(331): n = unknown
  misc_feature (367)..(367): n = unknown
  misc_feature (370)..(370): n = unknown
  misc_feature (387)..(387): n = unknown
aaactggnntatccctggtgtcaatgggagctggnggnaatactgncacanaaanagcngcgggnttacgtcagcctnaancaaaagaaaaaatncaagatgactaccatgcattgatgaacactctnaatacacaaaaaggngaaactcnggaaattgccaacaaagtttacgttatggaaggctatacattgaaacccaccttcaaagaagnngccaccaacaaatncttagctggagcagaaaacttgaactttgcccaaaatgctgaaagcgctaaagttatcaacacttgggntgaagaaaaaactcatgacaaaattcatgagtngatcaaagccggtgatctagaccaggattcaagaanggntcttgtcaatgcattgn

SEQ ID NO: 420 - DNA, 236 bp, Ctenocephalides felis
  misc_feature (161)..(161): n = unknown
  misc_feature (206)..(207): n = unknown
aatatattttttgacatcatagtaacgacctcctttgtttagtttgttggatccgacgtagatggaactcaaacggcctgcgactagacaatgtgcagcagtaagaacccatttttcattaagaatcgatccaccacaaaaatgtttcaagaatttatctnttaaagatacttgaaatggagcagaaccgggggcggcggtctgcnnctccacaattctggtgtggtcattggaag

SEQ ID NO: 421 - DNA, 447 bp, Ctenocephalides felis
  misc_feature (2)..(4): n = unknown
  misc_feature (30)..(30): n = unknown
  misc_feature (36)..(36): n = unknown
tnnnttttttttttttttttttttttgatnattagngatatttatttgagtagtaatatggtttaatttgttagttgagtatcaaaattttgtaaaacatctcgtcttagttagtctcgtcttagtcattgaaattaaggaatatcaaaaaatatttgtaatattataagttaaaactcttatattccagtgtgcattttgataaattctcttattggttttgaagccactcgggtatatactcctgggatttcgggtcgtgcacatcctattccccaagacactattccatgcagaactcccttagagttgacgagtgggccaccgctatctccttggcaagagtccttaccgccttcaggataaccagcacaaatcatattttgggtaattattagtccttcatttccatatatagttttgcactgagtccagttaacaataggt

SEQ ID NO: 422 - DNA, 367 bp, Ctenocephalides felis
  misc_feature (4)..(4): n = unknown
  misc_feature (10)..(10): n = unknown
  misc_feature (33)..(33): n = unknown
  misc_feature (56)..(56): n = unknown
  misc_feature (119)..(119): n = unknown
  misc_feature (187)..(187): n = unknown
  misc_feature (195)..(196): n = unknown
  misc_feature (198)..(198): n = unknown
  misc_feature (215)..(215): n = unknown
  misc_feature (221)..(221): n = unknown
  misc_feature (240)..(240): n = unknown
  misc_feature (259)..(259): n = unknown
  misc_feature (273)..(273): n = unknown
  misc_feature (340)..(340): n = unknown
tttntttttnttttttttttcttttttagggantttttatatttattttatgaacngctctgatttttaaattttaacatgtttactgataaaatctctaacaattggtgatgaaattngtgtgtatactccgggactgaccgcccttgcacacccgtcgccccaagatacgatccccacaagagtnttattttnntngacaagtgagcccgcgntgtttncttggcacgaatccttttnttcgtcaagaaatccagcncaaagcatgtgttntgtcaatgtataacgagcagcatacaatattttacagaaagaaaagtcaatcactggtatagaaacnccgcgaaggttttccgaaaaaacttgt

SEQ ID NO: 423 - DNA, 432 bp, Ctenocephalides felis
  misc_feature (61)..(62): n = unknown
  misc_feature (131)..(131): n = unknown
cagatgtatatgcaagagtatactattatttggattggatccatcaacatactgataatgnntctattgaacaactcagaataaattaattgaaaaaatagctaagttatcatagtaaagatcttgacgtntttataagatttaataaataaaaaacaatcatagataaaaaatcatagatagataaaccatagaatgctgttcctttgtatggcaaactgacaaattgattttaatcactaccaaattattttttgtaactatgataaaatattctataaaactattcctactaatttatgttatagatgaggtgatagtataggtcagtcagcatatgtgatatttaccagtatatttaagttgaaaccattaaattcagtattacgtgaaataaatgcaaaaaaaaaaaaaaaaaaaaaaaaaaaaaaa

SEQ ID NO: 424 - DNA, 354 bp, Ctenocephalides felis
tacctcatctacggtcaatgggaccctccagaatctccactgcattgtgctctgtcataatctggataagctgcgcaaatttgctctttataaatgggtctaaagtgcaaatcaccacattccttggatccgacgatctggtagtgcaattcttggagatgtgtttgtaaaactccgtcggtagtagaatttattccccatccgacaagagtagctgatgcattgtgtttagtttgttcattggcttctggcaaagtaactggttgcgcaaatttactatattttaagggttcagatagcttgagaagtgcaatgtcgttgatataactgttactaggattataacctttgtgt

SEQ ID NO: 425 - DNA, 498 bp, Ctenocephalides felis
  misc_feature (24)..(24): n = unknown
  misc_feature (54)..(54): n = unknown
  misc_feature (59)..(59): n = unknown
  misc_feature (98)..(98): n = unknown
  misc_feature (352)..(352): n = unknown
  misc_feature (376)..(376): n = unknown
  misc_feature (456)..(456): n = unknown
atacatatccaaaattcaacaagnctatgccatactggatcataaaaaattccnggggnccccgctggggcgaacaaggatattaccgagtataccgnggtgatggaacttgcggagtggaccaaatggctacttcagcggttttggataaaccagttgttaactagacaaaaatacaccaagtgccaaatatgatcctgccaaacctttccatgtttataagtagtgccaaacaaattatcttcggcgactgaaatattggacaacttgcatgcatttttgactattttaaattgaacagttcagcattatttatgtctggcagaataacagaggcaaaacaaacaaatgncgatcaaatattacaattcgatgngctcttaatttgcataaatatagatattatactaattcaaaaagcaatctgctttaaaatgagaatataaaggagcaagncgtcagttttcttttacatggtaaaatatcgacaacataaga

SEQ ID NO: 426 - DNA, 500 bp, Ctenocephalides felis
  misc_feature (99)..(99): n = unknown
  misc_feature (201)..(201): n = unknown
  misc_feature (220)..(220): n = unknown
  misc_feature (463)..(463): n = unknown
ccagtagtattagtagatttagccgaaagtggaactgaagttaaacctggagcaatacttagtgtcactggatggggtgcaactaaggaaggtggcggnggaactttgcaactacaaggtgtgaaagttccagctatctctcccaaagattgtgctaaggggtatccaccttctggaggtaaagacaaaattacagacagnatgttatgtgctggtcttnctgaaggaggtaaagatttctgccaaggcgacagtggcggtccactggtagatgaaaatagaaagcaagtaggagtggtttcttggggtcaaggatgtgccagaccaggaaaaccaggaatttatgctaaagtgtcacaccccgaaatcagaaaatttattgaaaaatatgctaatgtttaagtggattttatttcaatataatgtgatttaagatactctttaatggtatgtaataaattgngataaattaaataataaaaattggagaactggaaaaa

SEQ ID NO: 427 - DNA, 360 bp, Ctenocephalides felis
  misc_feature (53)..(53): n = unknown
  misc_feature (63)..(63): n = unknown
aaaatcgaatcgttggtggcaatgatgtaagtttttcaaaaaatgggtggcangtatcagtgnaaagtaataaccaacatttctgtggtggttcaatcattgctaaagattgggtgctgacttcttctcaatgcgtcgtggacaaacaaagtccaccgaaggatttaactgttcgtgttggaactagcactcacaatgatggaggaaaagtgtatgatgttattgaaattataaaacatccgaaatataataaagcagtgccagatgattttgatgttgcacttttacggatcaaagagccaatatcatttactccatgcacagtaactcctgtaaaattaatacaatcgggaaaagaag

SEQ ID NO: 428 - DNA, 266 bp, Ctenocephalides felis
ttttctacatccttgtcaacttcttgaatctttttatccaacattttctcaatctttgtaagatcgtcttcatcataagcgtctccgcaaatcttacgagctacaacattccattcctctattacatcatcttgtgggtagaactcagaaagatcagatgagtaaggctctggttcacctggactgatgttattgtctcccatatatgtgattaaatcacggaagtcgacatcacattgaattggattttgtgaaaaatcaatagt

SEQ ID NO: 429 - DNA, 328 bp, Ctenocephalides felis
  misc_feature (27)..(27): n = unknown
caacacaactctgcacatatattgcantttggaaaaggtgcatgtgctggtgattctggaagtcctttggcagcaggtggccaattagtaggtattgtttcctggggtgtcccatgtgccactggtgtcccagatgtctacaccagagtctatgcttaccgcgattggatcagatattacactggattttaatctcctaaactcatctcatttgttatattgtaaattatgtaaataaatatgaaaaatgtataatgaaaatacttgttaaataaaagttacttttattaagaaaaaaaaaaaaaaaaaaaaaaaaaaaaaaaaaaaa

SEQ ID NO: 430 - DNA, 235 bp, Ctenocephalides felis
  misc_feature (60)..(60): n = unknown
  misc_feature (62)..(62): n = unknown
ttttttttttttagttttaataattattgtagatcaacatgttatattactttgcatagngngatatcggttactaaataccagtatgtttcttcacaaattctcttatttctggatcagctagtcttgtaaatacatttggatatggaaaacttgtgcaatttctagttgaaaaagctgtcaagcctactaaaaccccattttcgtcaacgacgggtccaccaaaatcacctgt

SEQ ID NO: 431 - DNA, 549 bp, Ctenocephalides felis
  misc_feature (4)..(4): n = unknown
cggnggtgttattttaaataaagaatatgttcttactgcggcacactgtttcaatgatgtaactcatcattcggaaattcaagtcagagttggaagtacaaatgcttatcacggaggaataatcgtggatgttgaggacattacagtacacgaactttataatgaaaagttcacaaattatgatgtagctgttgtgaaattagcttatccattaagatttgataaaaatataaaagcagcggtactggcagaggatggatatgagccagaaataaattctaaggtcactgtatccggatggggtagtttgagctaccttggtccatacccagaagagctacaacaggtagatttgcaggtcgcagaccacgacgactgctcattgcttacatggcacacctcgacctgccgaaagtcaaatttgtgctccgtcctggtggagtcaaagactctgccaggtgactctggtggcccctgctgagaatggcgtcgcgtagcatgtgtccttggtgccgtgcgcggaccagatatcagagttatctagattgg

SEQ ID NO: 432 - DNA, 549 bp, Ctenocephalides felis
gaaaatcagaataaaatgcagaaattattgatactagtttcatttttatttcccttgatcgtctgtaaagaaaaccgaattattggtggagaagaagctaatatagcaaaacatggctggcaggtgtcacttttattattcggaaatcattattgtggtggagtaatcattgacaaaaattggattttaacagccgcacattgcattgaaaatgaaacaaatgccaataaaagatattcagttcgagttggaagtagtacacatgaaaagggcggaaaagtatacaaagtcaaagaggctattttacacccagaatatgatacttatacggtggactttgatgtagctctgattcgcctagccgaaccaattgcattcaccgcctgcacagtgcgcccaattcaaatagtagatgaaggagtaaaaacattggatggggcaatgttaactgtaccggatggggatccagacgactggtggagattaactacagaattaagaacgtaatgtccattattaataagaaaaatgtgatgaatttattctcca

SEQ ID NO: 433 - DNA, 549 bp, Ctenocephalides felis
  misc_feature (511)..(511): n = unknown
gaagatatgaagacttttttcaaaatatcggttttaatcgatctgtatatgttgacaaatgttgctgcggaaaaaaattctggtcgaatagctggtggaaaaataatagatatatcaaaatgtggatggcaagtttcattgcaaacatttgatcagcatctttgtggtggttctataattaataatcattggatactgacagcagctcatggaaatgctgatacttattcaattcgtgttggaagctctaggcacgactccggtggtgttgtatataatgtcacaaaaattataagacatcccaaacacgatgaacaaacatttgattttgatgttgctctggtacgtgttaacacacctatcaagtttacagtatgtaatagtaaatccgtcaaaattgaagaaaaaggcatcgaaacacctccaggaaaaatggtccaagtcacaggatggggtgcagaacaagctggaggtcccgctcatatttcctgcaggaacatggttctattgnagcaatggatctgcaagaaatatgcagaagattaaaac

SEQ ID NO: 434 - DNA, 549 bp, Ctenocephalides felis
  misc_feature (536)..(536): n = unknown
ttcaacttgtggatggcaagtttcgtttcacaataggaaaggacatttttgtggagggtccatcattggcaaagaatggattctaactgctgcgcattgtgtaaccaaatatgaaaacgatatcgaaggtttaaaagttagggttggaagcaatgagcataacaaaggtgggcgtttatacgacattaaagaaattaaaaaacatccaagatataacgatcgaaccagatacgattttgatgtcgctttattacgcattgcaaagccaattgcatacactgcttgcactgttgttcctgtagcattggcagaaactggaaaagaagttccagaaggcgcactcgttagtgtcacaggatggggggctactatggtgggcggccagcatcaacgcatctaaaaggtgttaagggtccaatcgtgtcaaatgaagaatgcaacaaaaattatccattcctggaggtctggatgacaaaatttcagacagcatgttttgcctggttcctgaaggcggaaaggactcgtgtcaaggagangcggtggcctgta

SEQ ID NO: 435 - DNA, 465 bp, Ctenocephalides felis
attgtattcagtgacaaagttcaaccaatcaaaattagcaaaagaaatatcaaggatggtgaaatctgcaaggccactggttggggtcgattggcggatggggccccagtaccaaacgaattacaacaagtggaaaccactgtaataacaaacgaaaagtgctacgaattgtctcaattcgttgaaccaacttcgcaaatatgtacattaaaagaatttggaagaggcatttgctttggtgattctggtggaccactggtttacaaagatgaactggttggcgtttcttcgtttctcttgtatacttgcggagctggacgcccagatgtttttgttaaagtgcgcgatttccaatcctggatcaattctgaaattagaaaaaattaaatagatatcaatcataatttcttgtaataaaaaatggttaaataaagacagcataatctaaaaaaaaaaaaaaaaaaa

SEQ ID NO: 436 - DNA, 549 bp, Ctenocephalides felis
  misc_feature (3)..(3): n = unknown
gcnttaggcctatgcctaggtgaaaaagttatattcaataactataaagtttatagagtaattgctgacaacttcgaacaagttgaggttctgaagaatttggaaaaggactctgatgcgtacaatttctggacccatgttggagccccaggcaaaaatgtagacatcatggtacccccacacaaacttgaggatttcgaaagcacgatgcaataccatagaataaaccacagtgtaatgagcgatgacgtccagaaagatatcgacctagaagtttttggtacaagtagagaagcttacagttggaccaagtatcaagatcttgaaacaacctatgcatggatggacagcttagccaaggcacacccaggaaaagtcactgttctcaccattggcaaaacttttgagggaagagacatcaagggagtcaagatttcattcggaactggcaaaccaggcgtatttattgacgctggaatccacgcccgcgaatggatcacactgccactgcacttacatcttaaacgaattgtgactccaaagacgccg

SEQ ID NO: 437 - DNA, 549 bp, Ctenocephalides felis
  misc_feature (474)..(474): n = unknown
  misc_feature (494)..(494): n = unknown
  misc_feature (499)..(499): n = unknown
  misc_feature (537)..(537): n = unknown
gaaatataaaatttcttttgtatatattggttttatgaatgatcagatgagtggattttacagaagttcttacaccgaggacgggaaaacaaaatggattgccaccactcagttccagccaactcatgcccgaaaggctttcccatgcttcgacgaacctctttttaaggcaactttcgacatttctataattcgaccaaaacatatggcaactttaggaaacatgaaacatctgaggaaagatgaagtggttgcagaccatcctaatcgactgaaagacaccttcaaaaccacactcaaaatgtcatcttacattgttgcatttgttgtttcggaattcaaaagtgtttcccaaaaacctgatcaggaatttgatgtttgggcccgacccaatgcatatacgcagggtcaatacagttacgatattggaaaacaaactttggtaaattagaagagttactggctataattcgngccaaggatggaaaaatggnatggnagcttttctgttttctgagccttggagaactgggcttntacttcaggaac

SEQ ID NO: 438 - DNA, 549 bp, Ctenocephalides felis
  misc_feature (526)..(526): n = unknown
  misc_feature (537)..(537): n = unknown
aacaaaccttcgtggaggttttgtttaatatcatccagcgcgcagcaacctcaaagaacatgcacagaattaaagtctgacactctggacatccaatgccaaaggggatttcgctcagtgccctgcaccagccgtatgcagcccgggaccagggcaaacttggcatgcaaaccaggattccagttgctcaaagaaccagagttctcgcaaattaattgcggaaatgatgggatttgggataattgtttgttttcttgcgaaccagaatgtggaaatccaacaccaattgaaactgtttttaattcggacccacctgtaacgtacttagcaggtcaatatccatggtatgcaatgttgtttacccgaagggaagatttattcaaaggacaatttctattcagttgtggggggtcaataatcaactcacgaatgatagttacaactgcttatgcgctcataagccagaaatcgattggatgatcagagagtgtgtggatctagtgtattcgtttaataaacagagatnttatgctagcntacgaatagaaa

SEQ ID NO: 439 - DNA, 550 bp, Ctenocephalides felis
  misc_feature (521)..(521): n = unknown
agcatttgtcagtggctgtgttttaatcaactgggttatcgtcattgcgataacaaataattagtataaaatcggccatttaataacactagccatcagttttcaatcgaacgttgaacaagaaacattaaaggataaaggggtaaaggatattttggatttttcaaaatgaagttgctagtattatttttaacattggtcgcctgcagtagcgccgtatccttctttgatttggtgaaggaagaatggagttcattcaagttggcccacaagaagcgctatgaaagtgaaaccgaagaaaagttccgtctcaagatcttcatggaaaacaaacacaaagttgcaaaacataaccaacgatatgaaatgggtttggaatcttacaaacaacgtatcaacaaatatgctgatatgttgcaccatgaattcgtccagactttgaatggattcaacaagaccagatcaaatgccttcgtcttgtggtgtcgaaaaattgcgtggagcactttcatctctctgcnacgtagaattgcaaacatgtgactgcgtg

SEQ ID NO: 440 - DNA, 550 bp, Ctenocephalides felis
  misc_feature (5)..(7): n = unknown
  misc_feature (16)..(16): n = unknown
  misc_feature (40)..(40): n = unknown
gttcnnncgcccacanacattttcaaaatgctaaaagcancaacaataatttttatcgctttcaattttgtgtctggtggcgtttatgatggttacaaactttacgaaataagaccccaaacaaaatccgaggcttacgatttaatggaatggcaagtaaaaccaggagtcgatttctggtccgaagccaggatgctcaatcaggctagccaggttatgatctcacctgaacttcaggaggaattcgaaggatatctggtcaatggtaattatacttggaaagttgctgaggataacatagagagacttttacaagattttgaaagaagcagaaaaaagtcaagtgccccacgtgacgatggatttgatttcaatgattatcaaagatcgcaaacgatcaacttatacgtaaacaaattgccaaaacgtatccaaaatatgtgactgttaaggatgaaggaagaagttttgacagcgaatcatcaaatctgtccaattacagatggatcaattccaaaaacaagcgcgatggtgatcgctgtggtgccat

SEQ ID NO: 441 - DNA, 548 bp, Ctenocephalides felis
ctcctccaggtcctaaggacaatgatactatagcaatttataaatttttagatactgaattttatgctgaggttggaataggccatcctgtaaagtatttcaaacttgtggttgacactgcatgggcagaaacatgggtggcctcgaaacaatgtggattaaaatgtgttggatgttggaatcttaataaatatgactctttggcatcatcaacatttcaagaaaacggtaaagaattttcttttggctcaggcaaagaagccataacagggttcttttcaatagaaagtttttatattggccacataaatgttaaaaatcagacttttggggaagtaacatgtttgccatggcactacttgttttcaaaagcagatggagtattaggattagcattcagcagtttatctattggcaacataatgccaatattttataatatggttatcaacaattgattaagaaacctatattttctatttattgaatagagatccaacgcaaatcatctggttcatcatgatcgggcatcaaatcctaacattata

SEQ ID NO: 442 - DNA, 549 bp, Ctenocephalides felis
  misc_feature (535)..(535): n = unknown
  misc_feature (547)..(547): n = unknown
tttggctgatcctgataaggaaagtcaggctgaaccttcaccatacaattaccgatgggaaattccaataacgtacatcacgaatgttaaagacgattataaacttgaatggttcccgagggaagatgctcaaaaaactattcaagtagccgaagatgtcgaatggataaaactcaacaatgatcaaatcggatactacagagtcaattattctgaggaaatgtggcaaaaattgagcaatgctatgaagaaaaggataattagtttttcagcctcagacagagcccatttattaaatgatgccttttccttggccgaagcaactttgttgccctattcaactgctttggagatgacaacttatttggcaaatgaaatgcattatgttccatgggcagttgcctctactgaattttattctttgaaaaaattgctatttggaagtgaagttatgagaaatttacgaaatatgcactagaaattcttcagctgttatgatagaataaaatgggatgtcatgatgatgaaaacattngataacatctcnag

SEQ ID NO: 443 - DNA, 549 bp, Ctenocephalides felis
  misc_feature (475)..(475): n = unknown
  misc_feature (540)..(540): n = unknown
  misc_feature (546)..(546): n = unknown
ctttgtctcagccaatccggctggaaggatcgttggaggcgagaacgctgatgatgcctctgctccttatcaggtttcactacaatttaaaaacttccacttttgtggaggttctattttgaacaaatactggatcattacagctgcacattgcatggggagacgttttgaggtagtagtcggtattaacagattagaccaggaaggctatagataccaagtagccgaaatagtcacattgccattcgattccgaaacaaataattatgatttggcacttgtaaaagttaagaagccaattaagttcaactacagggtacaaccaattcctttgggcgaagaatatgtcgaaggaggtgaagaagctcgtcttacaggatggggcagattaggagctgatgaccctgcaccaaacgaattgcaggaattgaacacttttaccatcagtcataaaatttgcaagaaagctcaccanatgtggttacccaagtcagatatgtgcatttgagaaaaagaaaagggctgctggtgacttgtggncattgncga

SEQ ID NO: 444 - DNA, 549 bp, Ctenocephalides felis
  misc_feature (33)..(33): n = unknown
ggcatccaaaactttatctattttgtgcttttnggtattgttctacctagtttcggataccgaatcctttatcttaaagaccaataaaactgatgagaagatcgttggtggtgaggaaataagcataaagaaagttccttatcaagtatcattgctccattttaatggacaccgtgtgcggcggtgtgattctgactagacaatttgtcctgacagcggctcattgcttcatgttcgtctacagccacgaagaagtcaaagtacgtgttggcagttctgaaataaaccatggaggaatgatatttgatattgaattctatgctcttcatcctgactatccagaagaccatgatgacacatctgattatgacgtggctcttgttaaacttgcatatccgcttaagtttagcgaagacatccaaccgatcatgatggctgaaaaggactacgaaccaccagcaggaaccaaggcttatgtgtctggatggggcagaacatcgtcggtggcaattgctaaaaatcttagaggagttgatagaaataatagac

SEQ ID NO: 445 - DNA, 549 bp, Ctenocephalides felis
  misc_feature (543)..(543): n = unknown
aaatgaagtctctattagcagtattgttgttggttgttgccacgtcggcaacaggaattgattggaaaaatgtgaaacctatcgagcaacctgccatcatgagcaatttgcctgcatggagaaaaactggagaacgtattgctgggggtgaagaagctacaccacaccagttcccattccaggtcgctgttcttgttcacatggatgatggcaaaagtgcattctgcggaggttccttgatttcccaaaactatgtgttgactgctgctcattgcgccgataaagcaaaatctttcaccgttgttctcggagctcacaatgtaaccgatgaaaacgaagccggaactttgagagtagagacttccactaaagttgtccacaaggactggaacagtttcttattgagaaacgacattgccttgttaagctgcatcaccagttcaattgaatgatcgtgtcaattatctcgattgccgaaaaaagccaagccacacccttttgatattgacgcactgcttaggtggggaagaatggagatctgtncacatt

SEQ ID NO: 446 - DNA, 549 bp, Ctenocephalides felis
  misc_feature (4)..(4): n = unknown
gtancatcagctgctccaccagccagtgaaccccaagtattgggttttcccgatggattcccacgagttgtaggtggacacactgccaatgagcatcaattcccatggcaagtatccctccaaagatttggaagtcacttctgcggtggttccatcatcaattctgaatgggttcttactgctgctcattgcatcagtggcacttccggattcgatgccgtagtaggaaaacacgatctttcaaaaactgaagctactgaacagcgatctgccttcaagagaaccattgtgcacaaatcttatgctggaggcgtcaatccttatgacatcgctttgatccaagttgccacaccattcaagctgaacgaaaacgttaaagctgttaagcttcaactaaagatgaggctcactcaggacaagttacattgtctggatggggatctacttctacttcagcttcccagctccctaataaactacagactgtgacaaaccaatcgaccataccccggtgtgaaaaggtctaggaggagccgatctactcattga

SEQ ID NO: 447 - DNA, 549 bp, Ctenocephalides felis
ctgtagtcctagtattggccttagggctattatgcagtgatgtttctggtttcttcagtcttcggtcccgaaaaaccagagaacctgtcgaatttgtcccaaagtccaggcataacgtccaaactttgtgggtgactcaaaaattggaccacttcaatcctcacgataatagaacttgggaaatgaggtatatgtccaatgatgaacacttcaaagctggtggaccaattatcatatacattggaggtgaatggacaatcagtgctggagctttgattggtggtcaacaatatgatatcgcagtccaacataatggatatttattctatacagagcatcgttactacggtgaaagtcatccaacaccagatgcttctaccaagaatcttcagtacttgagcgtggatcaatcactggctgacttggcttactttgtgattatgtcaagagtcaaatcacaggagccaaagacagcaaagtaatcgtgtggtggatcttacgccgtagtatggtgttggtccgctaaatatcctcccagtgcgacattgc

SEQ ID NO: 448 - DNA, 520 bp, Ctenocephalides felis
atttggttggcattcaggatgtaaaaggagcttgtcatgccgatgaattgggatatttattcaaaaatgagttgtcacagtttccaaaggaattggagagtgctgtggtgacacagaagaggttgttgagtttgtggacaaattttgccaaaaccgggaatcctactccatcaacaagcaatttgttaccagtcaagtggttaccagctaccaaggaccaactggtttatttatcaattggtaaaaatctagaaataaaagttaatccaatgaaagaacgtatacaattttgggaacgagccaccaagaaagattatttgtcacgtttgtaatggaatatttttaaggaaaattacctatagaacaaatactactttatcagtaagttatgtatttcaactatttaaaaccttgcatatcttgaattaacagtgatttgataactttttgcatttttacgattttaatattatagtaaatataaatatgaattgtgtttttaaaaaaaaaaaaaaaaaaa

SEQ ID NO: 449 - DNA, 549 bp, Ctenocephalides felis
  misc_feature (507)..(507): n = unknown
  misc_feature (527)..(527): n = unknown
aattcggcaccagaagtgaccgagttagaagttctgtcgttttatttgtgatatttgttagaagtttattgtaaaaaagtagaagcaataaacatgaagagtttgctgctattcgtagcagtttttgctgctgcagcacacgccttacccacggcggaaccaactacgactgcagttccttgcacacctggagaaaccaaacaagaggattgcaatgaatgcatctgcaaagctgatggcacaggatatcaatgcactgaaagagaatgcaaacatgacccagaatcaaaagcagacgatcatggaaaaatttgcgaaccaggatcaacgaagaaagaagactgcaacacatgcacatgtactcctgatggtaaaaactatatgtgcacattgatgatgtgtggacatcatcatgaaaagagagaaactgaaattgaagaagtcaaagaagtcaccattcaatcacttgcactacccatgtctctggccaaaacaagattggattgnatcttgcaatgcgcagggtnggacaggtctttgaccgccagc

SEQ ID NO: 450 - DNA, 154 bp, Ctenocephalides felis
tgtgtgaagaatattaatgatgaacgagtatttgttgttctctatgctttgagtgctgtgtattttgctggtgtcatggttcgactgatgttaactctgactccggttgtctgtgtgctgtcgggaatagcattctcctgtctgctggacttgt

SEQ ID NO: 451 - DNA, 215 bp, Ctenocephalides felis
ctctagctcgccatgaatctacaagagcctcgagagttgttagaattgcagcagtgcaatttgcactacccgaaggactcaacacgtggactcctgtggctgaaatgagagaggctttgtatggaaaggctaggaatattatacaagctgctcatgataataatgttaatgtgctttgcttgcaggaagcatggacaatgccttttgggttttgt

SEQ ID NO: 452 - DNA, 160 bp, Ctenocephalides felis
  misc_feature (16)..(16): n = unknown
  misc_feature (136)..(136): n = unknown
ttatttcccaatgcanatgcactgctggtgatttgactcgtatggctacaattgttgccgacaaactaggtgcccaacctggttgtccaccaattacagctttgaccttcttgcgtccattacatgccatgtttangcaaagggctctggaattgggggt

SEQ ID NO: 453 - DNA, 322 bp, Ctenocephalides felis
ggggagaatttttagagattttagatgatagtagaaagtggtggaaagctcgcaatattcgcggtcaagtagctcacgttccacataccatagtcacacctcatgcttgtggatgcgatgatagttttcagagacaagactctggcagatcatctataggcgccagtgagggcccgtcaggacccgtacagagtccatcgtcagttgactggattcgcaaccagcatcaggtaaatgggaacgagcaaaaaattgatcctccaccacctccgccgttgccagtaggagaattgcgctccagacaagaatcaccggaaccggt

SEQ ID NO: 454 - DNA, 210 bp, Ctenocephalides felis; identical to SEQ ID NO: 197

SEQ ID NO: 455 - DNA, 464 bp, Ctenocephalides felis
  misc_feature (2)..(2): n = unknown
  misc_feature (5)..(8): n = unknown
  misc_feature (10)..(10): n = unknown
  misc_feature (12)..(12): n = unknown
  misc_feature (61)..(61): n = unknown
  misc_feature (101)..(101): n = unknown
  misc_feature (329)..(329): n = unknown
  misc_feature (416)..(416): n = unknown
  misc_feature (431)..(431): n = unknown
  misc_feature (442)..(442): n = unknown
gnagnnnntncngccgtcagtgtgctgggaattcggcttcgagcggggcgcccggggcaangtacggtgcacatatattgatgtggcatctcaatgtctanccataggtaatatacaacataccctctgcacacttttgcttcgagcaacatttcgaataagccgctgaagaacggaagctggtgcaccaccagtaacagcaccaagctggcaataaattactgctgtgaatcccgcgcttggtgaagctcctaaagcgtccaggtagaatggatatcgtgcccacgaatctgagaatctggttaaagtcaaaagtgcgccaggattcntattccatactagacccgatcgaacaggttctcctggtaaacgctcacggattatctataataagtaatataagttgtaatgattanttaaatttatataantaaatattggntaacgtaattataaaactatat

SEQ ID NO: 456 - DNA, 292 bp, Ctenocephalides felis
gtcattttacaagtgcattattttttagtaaaaccttcattatagtaatagcttggaaaacataaatgttacttcatttttatatacacggtgaatttgttggaaatggactatataataaaaatatatttcttcaagccgatcgaagggtggttacaattaaaaaatatatttctattatatagtctaagagaaaaatactctcataactcctgtgtatggtcttcggcaaacggggcattcttttactgacagcgaacactttatacaggacacgacatggccacaaggt

SEQ ID NO: 457 - DNA, 498 bp, Ctenocephalides felis
  misc_feature (258)..(258): n = unknown
  misc_feature (296)..(296): n = unknown
  misc_feature (357)..(357): n = unknown
  misc_feature (366)..(366): n = unknown
  misc_feature (425)..(425): n = unknown
  misc_feature (439)..(439): n = unknown
  misc_feature (443)..(443): n = unknown
  misc_feature (448)..(448): n = unknown
  misc_feature (453)..(453): n = unknown
aaaactcacctaaagataaaaatgttgctgttcgaaaacaagaactccctgggcatgtaacttatcttgctgtgaattgtgatcatacagttttgtccatagtgttaacttctaatggaaactttatattacaattttatgatgttacttcatattataaacagacaatagtattagttagcgaagtaaggctacccagccctttgttacaaatgtcatggaatccctgtatagcaaatgtagtagctgctactttanaaaatggcacattgtggtcctgtgaatttggtaatggnctgaaaataaattcaacaggaaaatgatgtgcaagctttatcattatcatggagcccgaanggaaaacanattgtcattgggacaaaatctggcacattatgccaattcacaccagatttgaagccgtnaaaacatcagtgtntccnatatnaaagntccataattctgttcatggtgagcattatcagtttgagctacatt

SEQ ID NO: 458 - DNA, 498 bp, Ctenocephalides felis
  misc_feature (485)..(485): n = unknown
  misc_feature (490)..(490): n = unknown
  misc_feature (494)..(494): n = unknown
tgaaatgtgaagacgacgtcaacgaatggtttgacccaaaatctttctcgtgcagaactgcatgcaaaagtgaaaacgttttttccgatcgaagagattgtaaaaaatattatcaatgtttcttggttaacaacaaatggcaaataaaacattatgattgtccaaatggcttgcactttgataaaacggagttgcgatgcatacccacgccacccggcgaagaatgcaaaagtgagattgctaagtaaggcttaaaccaggaaaacaatcttgaatagactaattaggattcaaattaccataaagtagtcaattaatataataaatacacaaatgatctgtgcaattaaatataaaaaatatgtataaaaattaaaatgtataaaattgtattttatgtaaggagcacaaacaaaatgtcattaactatagtaatttctgattatttaaaatatataaatatagaagctttataaaaaaaaaanaaaanaaanaaaa

SEQ ID NO: 459 - DNA, 267 bp, Ctenocephalides felis
cccgctgtcggaccaaagtcgcttcatagctgctaaaagttcctcggaaaatgcttctgtatcctccatacgttggattacgtcaaagaccattttgccgtccgtctctctttcattgttcccaaaactaatgcccaaattgggcatggcccgcagtatggcaaccagtgattgaatggtattactgtaaacaactggtcgatattgtttgaagtcttcgcttgtgaaacccgactcatggataattttcatttgttttacgatagt

SEQ ID NO: 460 - DNA, 351 bp, Ctenocephalides felis
ttgcaacaatgatacgggagtgttggattgtaatgcacgccaaattttaactgtttttactgatgatgaatggaataaactaatggatgactccaaaactaacatcagtgttgtgcagatgcaaaataatgaattgactcatttattaccgtttcctgcacttgatataaaagttttagacttgagtctaaacagaattttaagaattgagccagcaactttcaaaaatctccaaaatttgacagagttgaacttaagtaataacaggttgacatcaaagtttttaattccatcagtttttgagggtgattattctccagatgcatatgagccattaaaatcgatgaaagt

SEQ ID NO: 461 - DNA, 500 bp, Ctenocephalides felis
  misc_feature (7)..(7): n = unknown
  misc_feature (12)..(13): n = unknown
  misc_feature (18)..(18): n = unknown
  misc_feature (26)..(26): n = unknown
  misc_feature (28)..(28): n = unknown
  misc_feature (36)..(36): n = unknown
  misc_feature (38)..(38): n = unknown
ctttganttccnncctcngaagctcntngtgtgctncnaatttgcggaaacacctcagattttagcggcagcggaagaaatttgtggaccttatgtctggggccgttatgatttacttgttttacctccttcattcccttatggtggaatggaaaatccatgcttgacatttgtaacacctactctattggctggcgacagatcgctagtgagtgttgttgctcatgaaatagcacatagctggactggaaatttagtcacaaattgcagttttgaacatttctggctaaatgaaggtttcactgtatttgtagaatacaaaattcagggaaaattgcatggtgaagatgttagagactttcattcgctttgcggactcacaacattgaaagaagaggttcaactattaggtgaaaccaatcaactgactgctctcgttgttaacttacaaaatttaagtcctgacgatgcattttcttctataccttacatgaaaggct

SEQ ID NO: 462 - DNA, 176 bp, Ctenocephalides felis
ctgtcactggctgatgggtcgacgctcacctacgatctatacaaagctcttaatccggataaacatgaagatgaggtaactctggcagtgtgccctggcattggtaactcttcggagtcagtctacattcgcacatttgtccattacgcacaatattacggatacagatgtgccgt

SEQ ID NO: 463 - DNA, 498 bp, Ctenocephalides felis
cttattcctaaagctagtaatgccgaaagtaaggttttctatcttaagatgaagggagattactacaggtatctagctgaagtagcaacaggagaaacccgtaacaccgtcgtagatgattcacagaaagcttatcaagatgcatttgagatcagcaaggccaaaatgcagcctacacatcctattagattgggtcttgcacttaacttttccgtattttattatgaaatactaaattcacctgataaagcgtgtcaacttgcgaaacaggcattcgatgatgcgatagcagagctcgataccctaaatgaagattcatataaagattcaactctcataatgcaattgctgcgagataacttaacactgtggacatcagacacgcagggtgatggagatgagcctcaggaaggcggggacaactagtcctgaaaaccttacctatccacttccgtatccttaattcacccttatacaatcccttcgttatttggtaat

SEQ ID NO: 464 - DNA, 246 bp, Ctenocephalides felis
cagattcatgttgtaaaacagaaataccaatgtgtgggaaaagtgaccatcccagcaatattccttatacgggttgtatacacagtatgactgatagattggaacatcaactttggcttttaggagcagtaggcctgggaatgtgcgctttgcccgtatttggaatgatattcaactgttgcctttatataaaattgaaagattttattgacgattgaaaaaaattatttgaaattattttaacgt

SEQ ID NO: 465 - DNA, 477 bp, Ctenocephalides felis
  misc_feature (390)..(390): n = unknown
  misc_feature (417)..(417): n = unknown
  misc_feature (433)..(433): n = unknown
  misc_feature (456)..(456): n = unknown
  misc_feature (471)..(471): n = unknown
  misc_feature (477)..(477): n = unknown
atctttatcagtgagccagttagacataacgtgaccacatatacctacagcatcccattcaatgttagatagacctgatacatcggagtaagtagcctgcgaaagcaaatgctgtaaggcgtgtccaaatttgttgaataaaattgatacctcttttagagacagaagagaaggtatattgccctcaggagggatttagacttaaaattaatgatgctaatggtgttgtatccacaattttacttttattgcgcatactcaacatccatcctgaactcttttggaatatcttctcttcttctctagtataaggatctaaataaaatcagccagtggcaattcagctgcagaatcatgtatatcaaaataccttacatctttatgccaagnattcatatttgcctttcgataattttnataccatcaacttttnacacaactggaatagccccgtcnaaaacctttggaatnggaagn

SEQ ID NO: 466 - DNA, 395 bp, Ctenocephalides felis
ttagcccaagtttcacagcaggtttggcagtcactataatagtatgctccctttcattttctcctgaaccaactttgcatgtgtaagagccagcatcatcttgttcagttttttcaataatgaattgatgttcttcctttattaattggtaacggtccttgagatcattgatttcttctacttttttctcatctttaaaccactgatcaacaggaccatctttcaatggacaggttagaaccaatggactacgaatatcaaaaagtttttgcgacgtggcttcaccttctctggcataaacactgctttggaccaaaaataataaaattgcactacacaaaaactgcttcatatttattgaattttcttcccctcgattgaaatagttcataagt

SEQ ID NO: 467 - DNA, 211 bp, Ctenocephalides felis
ggaagcaccttaggctgtgcagggacatgtaactgtatagcattttgtgcccagagccataggtccgcaattatgacgtaacggatcatatgcaaaatttgcggggcaataatattgggttcctatactattttcgtcacaataataatagctttgacaatcatttatatttggataaaatctcgatggtgacggacatttgaaaccttgt

SEQ ID NO: 468 - DNA, 500 bp, Ctenocephalides felis
  misc_feature (1)..(1): n = unknown
  misc_feature (4)..(4): n = unknown
  misc_feature (58)..(58): n = unknown
  misc_feature (68)..(68): n = unknown
  misc_feature (70)..(70): n = unknown
  misc_feature (80)..(80): n = unknown
  misc_feature (143)..(144): n = unknown
  misc_feature (207)..(207): n = unknown
  misc_feature (231)..(231): n = unknown
  misc_feature (272)..(272): n = unknown
  misc_feature (310)..(310): n = unknown
  misc_feature (464)..(464): n = unknown
  misc_feature (484)..(484): n = unknown
ncantggccatttttatcagttctttctttatcaactgattgttgagtttttgctctnagtgtttcancnaattcttcantagccgtctccaagaagacccctcattctataaacaactctcattgattctccttcgcattgnncagccaaccacacctttttataaacttctttcactggaagatccaaactcatgattttgttgntgaccagtaattccataccattgncatcttctaataatgctactaattcacaatcttgacaaatnttatttttaacatctctcattaatggccaagaccaggntcattctggaatatggattacccaacatgcgaccctgtaaaaagtcttcttgttgaggatccttctcaagagataagaaaaattccccaatatcattttcttctggataataattgagcaaagctttaaatataaatacaggagttcgacatcntcaatggatattattactgnttccatgccccagaca

SEQ ID NO: 469 - DNA, 251 bp, Ctenocephalides felis
aataaatataattttattatataagaaacatatgtataacaatacaaattataactatttaacagtcttcttgtgataatttcttgacggccgtatctgtagactttgatacaccttttttcggtaagctccagaacacctgatccctgccgaatacgtgagcttcagttagcgtttccggtaacttttggtgtaaagtttccggcaagaacattccggaagtcgcgcccaccatcatcattacggaaagt

SEQ ID NO: 470 - DNA, 498 bp, Ctenocephalides felis
caataaatattgaatttacaggcttatgaacaccattaagagtaaacctcaatttgatcacagcacccttctctcccaactcaattttcttcgtataccccatgtaattgatatgattagccctttcctcttcctcgaaataaacccaattatgtagacctgttacttcacaattttttaattcagctaagaaaacatgctcaaatgctgaactaccgattttgcccctcctctggagtataaattaaaccaaatcgttttcaataaatccttatgagtttggggatctctagtcacaattcccttttcaataaaaaaattcataagatgtcgcatcaggctggtggataacattgcatctaacaaagcattttcttcatttctttcttgtgcagttacatgttcatttactgcagtatctaattcataattattaaataatggtttcataagcgctatagttttaatatcaaaagctgctgattcacaacaagcaat

SEQ ID NO: 471 - DNA, 105 bp, Ctenocephalides felis
agaggggtagcttttattccatttattgatgacatgccttcttttaatcgcaaagtggatggaccatttataatgcctgttgtagacaagtataaagacatgggt

SEQ ID NO: 472 - DNA, 496 bp, Ctenocephalides felis
  misc_feature (53)..(53): n = unknown
  misc_feature (57)..(57): n = unknown
  misc_feature (129)..(129): n = unknown
  misc_feature (238)..(238): n = unknown
  misc_feature (310)..(310): n = unknown
  misc_feature (341)..(341): n = unknown
  misc_feature (449)..(449): n = unknown
  misc_feature (464)..(464): n = unknown
  misc_feature (468)..(469): n = unknown
  misc_feature (485)..(485): n = unknown
  misc_feature (495)..(495): n = unknown
ttttttttttttttttttttttttgaaccattttataaaattttataatcaantcantactataaatttataataatatcaataacaaaagttattttatagtagtcataatatactttgcattaatanttcatacacacacacacacattacttgtcttttcaattccaatttgttcttattctcgtccttgttcaaatgtcgatgttcaatgttgtattaagcattctattgtgantttagtattggatttcttaacattaaagcagcttctgatgatattattggcaacgcattgacacaatgatantttattaaatgtgaaatactttcaaacattntatctctggtgtcgaaccactcctttaggatcaataagtaataaatgcttcttattaactccttgaataccagtcagcacatattgccaggacttgctcgtgactctngaactagaaaatctncatnngttttaccaaaccctnagaacaactnt

SEQ ID NO: 473 - DNA, 500 bp, Ctenocephalides felis
  misc_feature (30)..(30): n = unknown
  misc_feature (59)..(59): n = unknown
  misc_feature (66)..(66): n = unknown
  misc_feature (119)..(119): n = unknown
  misc_feature (205)..(205): n = unknown
  misc_feature (238)..(238): n = unknown
  misc_feature (256)..(256): n = unknown
  misc_feature (353)..(353): n = unknown
  misc_feature (391)..(391): n = unknown
  misc_feature (397)..(397): n = unknown
  misc_feature (499)..(499): n = unknown
aaataattcaggagccccgcaaagtcaganttctatatgactttgaagcagcagaaganggacganttgaccttcttagctggtgaaataatccatatgctagatgattcacatcctanttggtggaaaggatataatcaacatggagaaggtttatttcctgcaaactttgtaactgctgatttatcaagttgaaccagaacantttagaattgatgctaacaagaaatctgttcanttttctgatgctgttcangtcaaaactatatctcatgatgatgaaaccagtcctgaaattaatgaagaaagtatagatactttattaaatttattacatgaagcaaatcctgaanatcctaatgatgatacagagcaaatgctcaacttagangttcangtaaataaaatgggccctctgattgatgctgaattaagaaaatattgacaggaaacatgctcaacttacgcaattgagtggcgatttagtagaagcacttant

SEQ ID NO: 474 - DNA, 500 bp, Ctenocephalides felis
  misc_feature (51)..(51): n = unknown
  misc_feature (53)..(53): n = unknown
  misc_feature (175)..(175): n = unknown
  misc_feature (273)..(273): n = unknown
  misc_feature (293)..(293): n = unknown
  misc_feature (369)..(369): n = unknown
  misc_feature (433)..(433): n = unknown
  misc_feature (436)..(436): n = unknown
  misc_feature (462)..(462): n = unknown
  misc_feature (474)..(474): n = unknown
  misc_feature (478)..(478): n = unknown
  misc_feature (494)..(494): n = unknown
  misc_feature (500)..(500): n = unknown
tttttttttttttttttttttttttttttttctgacagactcgagctaggngnaaaaaactacatttttacagatgcgattaatgaaaattaaagtttgctactaatccacatctatccttgattctgtttttgctgctaatgtgccacaatgaaatttagatgctctcattttnttaaaactaagtgttaaatcatccattgtaattggtcgtagagcatcatgaaattcctcttctgcgtcttgtatgtgtggcaccaaaggtgattcagngtgcatataatctctaactntatacacagaagcatttcggcataattcccttaagtctgatcctgaaaatccctcagtgagtttagataattcatntaaatcaacttcatctgaaataggttcattttctaaaataagctctagtatcttgaatctttgntgncttatgggcatgccaatatggaatgnggctggcatacnccgnaaaaatgctttatttnaatttn

SEQ ID NO: 475 - DNA, 462 bp, Ctenocephalides felis
  misc_feature (61)..(61): n = unknown
  misc_feature (231)..(231): n = unknown
  misc_feature (237)..(237): n = unknown
  misc_feature (249)..(249): n = unknown
  misc_feature (332)..(332): n = unknown
  misc_feature (406)..(406): n = unknown
  misc_feature (423)..(423): n = unknown
  misc_feature (428)..(428): n = unknown
  misc_feature (434)..(434): n = unknown
  misc_feature (447)..(448): n = unknown
ttggtccaactgtttggcatttgtggatatattcaaaatcagccaatgctaattttttttnggtgttacattggcatttgctacagcacagatttttttagtcactgatatcttatttgcctatattaaaagagaatataccttgaagagtggcttgaaacgaatattgaaaggcaaacctgcaaaattagctttagaataattttattataatgtttgaattgaaatgtntttgantttaaatatganttaagttttaaataaaagcttttttatttttacattataatattatgccattagcctatattgttacacagttaaatttaaangtatttaataaatgggtttacaactaaacaaatcacaaacacacataaatataataaaaactggatgaaaatanttgaatatatatataantcgtnaagaangtcaaccttctgnnataatggagcttgt

SEQ ID NO: 476 - DNA, 549 bp, Ctenocephalides felis
  misc_feature (2)..(2): n = unknown
  misc_feature (544)..(544): n = unknown
gnttgactgacctgaaataataaatatcataactgcctgtgtaattttttatttgtgtgttatacggtctttaaataaataaaggtttcttaaaaatgccgctaataatcatgacaggaatacccagtagtggaaaaactcatcgaacactagaaataaaaaaatatttcgaggaagaaagaaagaaaacagtacatgtggtttctgaatttgaagccgtcacaaaatcaggttattcaaaaaatgatatttatcttgatgcccaaaaagaaaaaatcgttcggggcattctaaaatctgaagtttttcgattattgacgaaggataatgttgttattctagatggaggaaattatataaaaggatacagatacgaattatattgtgggagcaaagctgcacgagttcctcaatgcacaatttggacatctatatctaaagatgatgcttggaagttcaaccaaaattcaccttccatatcaaaagaagttttgtgagctttgttttcggatgaagacctaatccaacaaatcgtggggatctnctttt

SEQ ID NO: 477 - DNA, 549 bp, Ctenocephalides felis
gatgacagtaccatcattcaaaggcaatataacagtcttcaccaatagttacttgggactcggtttaaaagctgccagacatgcagtttttacgaaaaacaatggagactccaaatcgttgtccagcccttgtattaatcctatcatcaaaaacaaaccttgggtgtatggcaacgttgagtacagtataagtggcactccgctagaatcaaagaaattagaagtagattggccaaaatgccgcaaattattagcagacaccctgttacctctagtcgacccaaaacctataggtttagaagtacaagatattgcagcgttcagctatttctttgacagggctaccggggctggactgatagatccatttttgggcggcgaaataacagttggggaatttgaaaaaactgcaaaagccgtttgcaaaaccgcaaacaccgaccagcccttcatgtgtttcgatctaacattcatatcggcttgctaaaggacggattcggattaaaacctgaatcgaattaaaatactaaaaaagatcgcaccacaaat

SEQ ID NO: 478 - DNA, 417 bp, Ctenocephalides felis
gttaagagctgtcaaattattgtacaaatatttctaaattaaatacgtatatataatttaataaataatattttactactatgaaaagagccgcaaaaaaccttctactagaccgtctgcacaaaggcgccgtcatggcctgcatgggcatcaccgttttgggaacactcagtcttggattccgagtttatcaatactttactgatataaaacctgaaatacaaagaaaacaaatattggcaaagaacgagctgttaaaagaaggagcctcggacatatcattatacgagagcaatatcacgttaaaggaataactcctaggatagtagatatatttagtactgattactccaaaaatgtatgttatataatgtaaataagacttataatttatttcaaaaaaaaaaaaaaaaaaaa

SEQ ID NO: 479 - DNA, 549 bp, Ctenocephalides felis
gttaaccgaaatccgaattataaaatttataaagtcaacgcagcaaattttgaaatcgtcgatattgaatcgtggtactacgatttagccgaggcaaataaaaattctattgtaaacccagaatggaaacaaatgtacggttcattcaagacagagtttggcttaaattcattgaacagttcagagatgcacaggcttgtattgaatatgaaaaccaacaataaacttggaaaaaaatattttgaatacaaagttaaacgtgctgatcctgaattaaaaaaaggctgtgataaaacctgtcttaaaaatcatttgtgcgcaatagttaccacagttgtatcagatctcatccagtgcaaaaatatcatcaaatcatcatcaagcattcttcagcatttgaatatatatgtcctaggagctattgtaatttccaattatttattattataaagtcatttttgttaagttattataaattagaataaatcattatgtggaaatatgtaacgcttgaaaagctagacaaatcaatattttagaaaaaaaaaa

SEQ ID NO: 480 - DNA, 549 bp, Ctenocephalides felis
  misc_feature (50)..(50): n = unknown
  misc_feature (52)..(53): n = unknown
  misc_feature (55)..(56): n = unknown
  misc_feature (59)..(59): n = unknown
gcacatttgtgttaagttttaagcaggaaagttgaacataaaataacatntnntnnttnttttgcgtgtctttaacaatggatgttgaaaacgtcgaagcatctggaagtgttccaaatgttgctggagatgcatgtggggattctatggtcacggatgggaacgaaacccctgcaagtgccactggcgcagcaggtttagcccaagaaagagttaaacgtaaagctaaaagaattgtacgacaaaatagtcgagaaaacgtggcctcaggagcggtgttaccacaacgttcttggaaaaacagccgcagacctagaaatggtcatgggagagggctgcccaaaaaaggtggcgcggggggtaaaggagtctggggattaccaggctcagagcttttagaagagtatgaagatatcaatgatccaaactttgatactgaatgtataagtcacaaagatatagagttgaaggccgtattcctgaagtttctgcagaagaattcttgaaaaaggctgacccgtattcttgattttgacatgggatcccaag

SEQ ID NO: 481 - DNA, 549 bp, Ctenocephalides felis
  misc_feature (3)..(3): n = unknown
ggnttatttaattagaagactgttaagttttagaagatatgactgtagtttaacagtttatacgttttataaatcagcttctgaaactttaatttcataatgatttctggcgattttcctgaggacccagaaaaggagctgcagagtttagaagatgatgttgttcaagaaattctcaaaactggcactgatctgagacaatactcgaaacaaatagaaaaagaactgaaagatgtagaaaataaatctatacaggattatattaaagaaagccaaaatatagctagcttgcacaatcaaattggggcttgcgatgacatccttgaaagaatggaagatatgttaatgagttttcagagtgttttaggtaatatcagttctgaaataacgtctctacaaaaaaaatctgtttcaatgtccattcaattatcaaataggcaggctgtcgaggagatctctcacagttatcgaagatatttctgtactcaaagtctgtaccggaattttggatacccagtactgagaaagattataactcagttcaaatac

SEQ ID NO: 482 - DNA, 549 bp, Ctenocephalides felis
  misc_feature (459)..(459): n = unknown
  misc_feature (519)..(519): n = unknown
  misc_feature (529)..(529): n = unknown
gtgaaagagaggctacaaaaagacttcttgcacagctaccaataagcgcacaatcatatagcagttctccttatctggatttgtcattgtttagctatgatgacaaatgggtatcagttatggagagacctaaagcttgtggggaatatcctattagattttatgcacgtgattctggccttctcaagtttcgaatatatgcaggagctgttgctaaaacaccacctgcagccactagaagattggtagcttttacatttcatcctaatgaaccatttgccattagtgttcagaggacaaattctgagtatattgtaaactttcatgtcagacatgctagctagtttttacaaattatttgcaaaagctaaaaaggttacatgatgtaatcaattaggtgggtgttgagaagatttgaaggtaattttaactcaaaacatatctttataatgaaattgnaatattaacatgcgcatatgttgtgatcaatttaaagtggtatagatgatgtgcctttgngcagggatgnagttgattattatagatatc

SEQ ID NO: 483 - DNA, 550 bp, Ctenocephalides felis
  misc_feature (496)..(496): n = unknown
aagccgcatttgttattgagaaatatatgctaaaatatattgtctcagaattaatataatgtgctgagtttgcattaatattgaaacgttttattcattctgaggcatctatataaaataaataaatatgaaagcaattttgataacattgatagtcgccgcggctgtgtattccgtaaggcctgaggttttcctggaagaaaacttcgtagacgatacgtggacaaatacatgggtttatagtgaacaccctggcaaagaattcggcaaattcgtgcacactgccggaaagttctataacgatgccgaagcagacaaaggtttgcaaacaagtcaagatgctaggttctacgctctatctcataagttcaaacctttctcaaataaagacaagacattagttgtcaattttctgttaaacatgaacaaaacattgactgtggaggtggtacttgaaggtgtcgattgaagttgaatcaaaaggacatgcatggtnaagtcctatgaaatatgtttggcctgcatttgggccaggaactaaaaggtccgt

SEQ ID NO: 484 - DNA, 550 bp, Ctenocephalides felis
  misc_feature (520)..(520): n = unknown
cgtgcaattaaattgtgtcaaatttcaaatctaccctgccaaaagggccacattgattatttaaagtccctcgcactcacacgcacggcaccactatgtctacggtcgacaaggaagaattggtgcaacgagccaaactggcagagcaggccgaaagatacgatgatatggctgcggcgatgaaggctgttacggaaaccggtgtggaattatccaatgaagaaaggaaccttttatctgttgcctataaaaatgtggttggggcgcggcgttcatcatggcgtgttatctcctccatcgaacaaaaaacagagggttccgaaagaaaacaacagatggcaaaggagtatcgggaaaaagttgaaaaggaacttcgtgaaatttgttacgacgtactgggccttcttgacaagtaccttattcctaaagctagtaatgccgaaagtaaggtttctatcttaagatgaagggagatactacaggtatctagctgaagtagcaacaggagaaacccgtacancgcgtagatgatcacagaagctatcaagat

SEQ ID NO: 485 - DNA, 550 bp, Ctenocephalides felis
gtttcgggcgccatgaagctaattgaagagaaaactgaccgcgtccacgtcctgaaccaggcgtcggtggacacctggagcgtggccagagagattgcggcagctagcacggtagctgatgaagaagatgcattttatgtgtgtgatatcggggatatcgttaagaagtatcaattgtggaaggagcatatgccgagagtgcgaccattttatgccgtgaaatgcaatgacagtccgattgtattggacgtactggccgcactcggaaccgggttcgattgtgcgtccaaggttgaaattaataaggtgctgccaatgggtgtcaaaccagaggacatcgtgtttgcaaacccttccaagccggcgagtcacatcaggcatgctgctcgacgggggtggcgaagatgacctttgacaacgaatacgaacttcataagatcaagagattttacccaaatgccagattgattattcgcattcgtgtgattctgaaattgccaatgccactcggaatgaaattggctgcgatgcattcaatgaaccccgcgct

SEQ ID NO: 486 - DNA, 549 bp, Ctenocephalides felis
  misc_feature (546)..(546): n = unknown
atcgcgaataaataaatgtggcgatacattaaatcttcattattagtgaacaaggaactgatttaatatggaagataagcctgtgaagccatgtaaagagaagcgaaggaacaatgagaagcgtaaggaaaaatcccggaatgctgcacgataccgcagatcacgggagaccgagattttcactgagctggcggaatgtttgcctcttgctaaagaggacacggaccatcttgacaagacctcaataatgcgactgacaatctcgtatttgcgaatccgagctgccgtacctcaaattgttccagaagaggatatttgctcaacctcattatcgaataaggacaatgaaaacttcttattacaggcgcttggaggatttttgatcatgatctcacctgaaaacgatatcgtatacgtatcaagcaatgtcaacgaatatcttggaattactcagatcgatttaatgggtcaaagatgttcgactcagtcatccttgtgatcataatgaattaaagaacccttccccaactcaaccacaaaagatgntac

SEQ ID NO: 487 - DNA, 549 bp, Ctenocephalides felis
  misc_feature (469)..(469): n = unknown
  misc_feature (506)..(506): n = unknown
  misc_feature (526)..(526): n = unknown
  misc_feature (537)..(537): n = unknown
  misc_feature (545)..(545): n = unknown
caccacatccagttgaattattttaacatttactttttgccaacatatgtcaacgcgttctttaatctgtgtttgaagatcaagtgatataatttagaataaagtagtttcaattatagtatgtccacaatgaatccagaatatgattacttgtttaaactgctcttgattggtgattcaggtgttggaaaatcttgtctacttttacggtttgcggatgatacttatacagaaagttatataagcacaattggtgtagattttaaaattagaactatcgacttagatggaaaaaccataaaattacaaatttgggatacagcaggtcaagaacggtttcgaactataacttcatcatattccgtggggcacatggaatcattgttgtatatgattgcacagatcaagagtctttcggaaatgttaagcaatggctcgaagaaattgatcgctatgcttgtgatagtgnaataaatacttgaggcaaccaagagtgattaactccnaaaaagttgtagactcactntgtaagaattnctgccagntaga

SEQ ID NO: 488 - DNA, 549 bp, Ctenocephalides felis
  misc_feature (63)..(63): n = unknown
  misc_feature (112)..(112): n = unknown
  misc_feature (146)..(146): n = unknown
cagcgatcagatttaccagacacatctcattggcaaagttcaatttccaaagatgaagctgcntttgaaatagactactgcaatcctcaatcaagcaatcaacattcgaagncaactaaagataataacaatgacggtactactgntccagacgaagattttttttcgctcattatgaaaatacaaagtggaaggatggatgaccagcgagcaagtataaatataaaacgagtaatatagaactctactttaataattgtaataatattgtatatggattattagattacttttaatactagaatatttccaattttttaatatcattttttgtggattacatacatagaatagtctggctatcgattggtactttgactatgaattgttgtacctttgaaccgcaacaatttctaatataaaatgagtagaaggtttattagcgacataatagtgacattgctataatatagcatttaaatcaaacaaattaaaaatgtgattttattaataggtactatcataaagtcacaaaagcccttccggtac

SEQ ID NO: 489 - DNA, 547 bp, Ctenocephalides felis
  misc_feature (546)..(546): n = unknown
tgacaaaggcaaaaatgggtcgtcgaccggccagatgttatcgctattgcaaaaacaagccctaccccaaatctcggttctgtcgtggtgtgccagacgctaaaattcgtatcttcgatttgggtaagaagaaggcaggcgtagaagattttccactatgtgtgcatcttgtatctgatgaatatgaacaattgagttctgaggcactggaagcaggacgtatttgctgtaacaaatacctcgttaagaattgtggtaaagatcaattccacatcagaatgaggctgcatcctttccatgttatccgcatcaataaaatgttatcgtgtgccggagctgataggctccaaactggaatgcgtggtgcttttggaaaaccacaaggtactgttgctagagttcacatcggtcaaccaatcatgtctgttcgttccagtgacagatacaaggccgctgttgtaaagctctgcgtcgtgctaagttcaagtcctgcagacaaagactatgtttcaagaatgggattactaatttgacctgatgttatana

SEQ ID NO: 490 - DNA, 353 bp, Ctenocephalides felis
tgataaattgcctgcaagaatgagtttcagggaacgaaaagaatcggccaaatgcatgcaaaaggttgcattaaatatacaactagcagcagccagagtttcaactgatgttggcattaaagtaggagaagccctcaggaatgtagtggaacttcgtttagatttgggaaaatgttcttcagacaatttgaataaatgggaatccagattggaagaaattaatgatgttgtggaaaattgcatcgtgtgaaattgtaacttgaaataatttttcttaactattagttttatagatgaacaaatacataatctaataaaccagcaagtgaaaaaaaaaaaaaaaaaaaaaaaaa

SEQ ID NO: 491 - DNA, 373 bp, Ctenocephalides felis
  misc_feature (1)..(1): n = unknown
  misc_feature (4)..(4): n = unknown
  misc_feature (67)..(67): n = unknown
  misc_feature (87)..(87): n = unknown
  misc_feature (96)..(96): n = unknown
  misc_feature (99)..(99): n = unknown
  misc_feature (126)..(126): n = unknown
  misc_feature (135)..(135): n = unknown
  misc_feature (140)..(140): n = unknown
  misc_feature (142)..(142): n = unknown
  misc_feature (149)..(149): n = unknown
  misc_feature (153)..(153): n = unknown
  misc_feature (188)..(188): n = unknown
  misc_feature (196)..(196): n = unknown
  misc_feature (219)..(219): n = unknown
  misc_feature (231)..(231): n = unknown
  misc_feature (250)..(251): n = unknown
  misc_feature (256)..(256): n = unknown
  misc_feature (259)..(260): n = unknown
  misc_feature (264)..(264): n = unknown
  misc_feature (268)..(268): n = unknown
  misc_feature (281)..(282): n = unknown
  misc_feature (298)..(298): n = unknown
  misc_feature (300)..(300): n = unknown
  misc_feature (305)..(305): n = unknown
  misc_feature (309)..(309): n = unknown
  misc_feature (320)..(320): n = unknown
  misc_feature (322)..(322): n = unknown
  misc_feature (330)..(330): n = unknown
  misc_feature (333)..(333): n = unknown
  misc_feature (340)..(340): n = unknown
  misc_feature (342)..(345): n = unknown
  misc_feature (368)..(368): n = unknown
ntgnttccatccatattcatcacccaaatcacgttccatatcatctatttcctcatctttactatancttgcataatctttgcgtantgttctcancanaatcatagacacaagtcctactaaaantagtaccancatananctgttanatangctgaaccaatgtatcctatgttgaaagaagttangatccaantacttgtcaaacctattttcaancttgacattgcngggtttccatgtcacttcnnaagtnaanntcanaacngctccagttttanngtagttctttcttacnanatganacantcacatctacnanttgcgtgncantatatcnannnncaaatttcttgtgtgtgtagacntagtt

SEQ ID NO: 492 - DNA, 498 bp, Ctenocephalides felis
attgaaaaagttaaaattccaagtaaagatgttgacaaaataattttctgcctaaatttttataaagatatgagatttaagaacaattgaaaatttactatatatacatattacaaaaattcaaataattgttattctttgtcaaatacgttgttctttttcatgattacgatcattgtcagctgggtcatgtttcacatgtgatgtgtatatatcatatcccaaggatattgtattatcatataacactctaaacctatgaggtaatatataaaagtttatgatttgggctggcggccaaactacccattcagcagcgtaaagcctccaagcctttttcttaatttcctctattaattcatctttactagttttttctagtatagctaatgtaataaagaacatagaaatgcatattggtgagcatacaatttgatctatcacaacttttttcatgactattcctattgtgcgtcctggcaatcgtttatctagata

SEQ ID NO: 493 - DNA, 308 bp, Ctenocephalides felis
tgggaacagttaatttaaaataacaaaatgaaaggaacattattaatattatcatgtcctgtgatcatgataagtgccgaatatgctgacgtagatgtgtgccaagatttggacgatggaacttttcttgctgattcaaacaattgccaaaatttcttcatttgtgatggaggccgagcttggaaaatgtattgtccaggatcacttttatggaatgatcacgaaggaacatgtgattacgcacaaaatgtagaatgttaccaaccagaataaaacattttaatatcaaaaaaaaaaaaaaaaaaaaa

SEQ ID NO: 494 - DNA, 500 bp, Ctenocephalides felis
  misc_feature (365)..(365): n = unknown
  misc_feature (495)..(495): n = unknown
ctattacaactaggttaatttgttagtaagttttgttataactgttattgatattaaatatgtattatttttatatatgtaaacgaattataatttttgctctttgattacttctactctggtgcattaacttttattcaactagattaaatttttggtttacttcctatgcctcacatcagtgtccttcatgtgatcaggagtattttttcgatctggactttgatctgtatcactctcctccatttcagctttgttgcgtttcttttcataaatgagaataatcgcgcataaaattattacttcagcacagatcccaaaaatggccacaaagcagctaatttatcttgaactcgaaccaaggntgtagaattaacagtaattccaatgccttgattagtagcaatacatgtatattctcctcgatcgctttttcagccaaatcaatttccaagcagaatttggttattgcatgatcaacaattgatcgacggntgatc

SEQ ID NO: 495 - DNA, 244 bp, Ctenocephalides felis
gatcggttgcaatttgtcattgcaccaagcataaattgatgggtccggtgcataggttataaaagaattgggatttgtgcatttcatgacggtgcaatcagcttctgacgatttctttttacacatatttttagaatgatcatatacatagttaggtgggcattcgaaaacctgacctttaccatctttgcagaataagtatcttgtgcagtctttcggatctggctgatatcctacaaccgcg

SEQ ID NO: 496 - DNA, 500 bp, Ctenocephalides felis
  misc_feature (403)..(403): n = unknown
  misc_feature (422)..(422): n = unknown
  misc_feature (424)..(424): n = unknown
  misc_feature (431)..(431): n = unknown
  misc_feature (438)..(438): n = unknown
  misc_feature (451)..(451): n = unknown
ccaatatcgaagtgcgtgttcggccgccacgctcaatggagatccgtttagatgtgtttgccaataacaaacgcatttatttcgacagaccttctctcaagtttcaacacttccaaggtgttactgtatatacaccaacatacatcttgaatcagtctgaagttgttataatgtttgcttccggagccggagtagaagttgtagaaaatcaaggatttatgactgctagagtttatttaccatggacatttattaataaaactgctggtctactcggaaattggagttgggatatggcagacgactttgtcaaacctgatggaacttttgtgcctgttaatctcaacagttttgaatctgttcataaagatttcgcacgtcactggatgctggcggatcgtgnaaatgaacacctcggagcngnactcttnacttcgngaatttggtcgcncagccagttattatgcaaattcctcattttaccaaactgggttaaagaa

SEQ ID NO: 497 - DNA, 411 bp, Ctenocephalides felis
  misc_feature (9)..(9): n = unknown
  misc_feature (162)..(162): n = unknown
  misc_feature (165)..(165): n = unknown
ttgtcattnttgttctactttgaagttgtgcgctggacaagaaaccccaattacaacaatcaattgtagagactcaaattccgatgctccattttgtgtagatgatatgtgctcatcaaaacctggggaaaactgtaagacggcagaaactacatgcgcggntgnaggatatcagccagaatccgaaagactgcacaagatacttattctgcaaagatggtaaaggtcaggttttcgaatgcccacctaactatgtatatgatcattctaaaaatatgtgtaaaaagaaatcgcagaagctgattgcaccgtcatgaaatgcacaaatccaattcttttatacctatgcaccggcccatcaatttatgcttggtgcaatggcaaaatggacccgatcggcccctgaatggg

SEQ ID NO: 498 - DNA, 498 bp, Ctenocephalides felis
  misc_feature (28)..(28): n = unknown
  misc_feature (369)..(369): n = unknown
  misc_feature (410)..(410): n = unknown
  misc_feature (447)..(447): n = unknown
ccccatatttctttgctcgtttagttgngcaacagcagcatcttttaaagaatacaaatggggcatttccatttcagtttttgctaggcataatgctttttcaaacatttcaattgcacgctcaagattccctcgttgaacctcaatagttcctaaagtttcatagccaaattcacatttgggatcaagtgaaatagcttcattaatcaattgaactgcagtatcaacatcacctgtccattgcaaccttagtaatcctttatgaacataaacaatagcattattaggctcaatttcaatggctttagagaaatatgaatctgctttggagtattgtctttgatcacaaagcacttgtgcatataaagnatagcactctatacagagaggaaattttttaatggcattgncaaaggcccaattatttcttttgccttattcatgtcntaacagcaaaagcatatcgatggtcgtatatattttttggacataagccat

SEQ ID NO: 499 - DNA, 598 bp, Ctenocephalides felis
  misc_feature (100)..(100): n = unknown
  misc_feature (105)..(105): n = unknown
  misc_feature (160)..(160): n = unknown
  misc_feature (273)..(273): n = unknown
  misc_feature (503)..(503): n = unknown
  misc_feature (546)..(546): n = unknown
  misc_feature (587)..(587): n = unknown
tccaatataaagaaactctgtcacattgccatagaaaggattcaatacaaaatttatgccaacttataactggagatgccttactctattctatgtttcnagaanaatcagttcccgtgacttgccctttgaaaggacctttcacattcacatataatangggacatggcgaatgtatgaatccagtatcgaacattgaaagttgcactgaagacagtcgacttattttaacataccaggcatgtccggatgttcatggaactgaaagtgcantggaagaactggagtgtctagcaacatggaatgaaggtaatgctcgatacctggttggtaaaatgaatcatcgacatgccataaccagtgaagatcgatacagatgctttgtttatgagaaaataactggaattggagataaagtaatggatacaaaattgcacaatcatgagatgctacttgcaatggattgtttagtgctacagaaggtcacggacaatgactttaanacaagctgctattcctgagcggtgtcgtttccgaattggttanctgctggaccatcacactggcaaacagttgataatcacaanttactggttca

SEQ ID NO: 500 - DNA, 462 bp, Ctenocephalides felis
  misc_feature (254)..(254): n = unknown
  misc_feature (307)..(307): n = unknown
  misc_feature (326)..(326): n = unknown
  misc_feature (373)..(373): n = unknown
  misc_feature (393)..(393): n = unknown
  misc_feature (418)..(418): n = unknown
  misc_feature (424)..(424): n = unknown
  misc_feature (432)..(432): n = unknown
  misc_feature (453)..(453): n = unknown
  misc_feature (461)..(461): n = unknown
ccaaatattgcagttcctacacgaacaatattgctgcccatttcaatcgcttgttcaaagtcatcagacattcccatagataaattaacttcttttggttctaaatttaattccttgcataattgctcacgacattgttttaaagtgagaaaatctgggttgggtcctaaacttgtatcatagccatattttccaatagtcattaaaccatcaacaagtaggtttgggcaattttctttcacatatttgtatanagttgttgcttcatttgggtgaacaccatgtttttctatttcaccacttgtanttatttgaatcataactcntaatttatcaccatgaattttattagctgaatctaattttgaccaancattctgcacactgtcgggntaatttaaatgagtgaattgtttcnaccacnatatatcncaggtatgttaacaccttaanaattttant

SEQ ID NO: 501 - DNA, 216 bp, Ctenocephalides felis
  misc_feature (32)..(32): n = unknown
  misc_feature (63)..(63): n = unknown
agactgaccctgggcccaggcgtttgcttaanttgtgacgttaaagacgaccaaccacagtgnacgaatgatgaaataagcccatccacaactgctccaagttcaaacgtgaatgaaagcaatggaaacctcaccgaatcacaacccttaagccaaaatacttcaacaaatactccattagaaacatcaaatacctcactagcagaaagcagcagt

SEQ ID NO: 502 - DNA, 489 bp, Ctenocephalides felis
  misc_feature (446)..(446): n = unknown
ttgttgtattccatgcccactgaatccagttgctatatatgtattattgtgatatggatgcaatcctataatgccattttcatcaaaggtattgtattcgtaataaccagcccaagcacttttaactttaattgcttcaaaacatggaacacgatgtgctaaatgtggccaaacgttttgttcaaaataatccatatctacatctaagttatcgactggcggttctttgtcaggatctggtgaacgaccacagatatatctgccacctaatccatctcttctaaaatatgtatttgttggatcgattgtcagaggtgtatttaaacctggaggcgaatgatgttgacactcaaagctatacacatatctttccacaggtaaaggaattgacagcaatccttctccagtaccaattttagctaatctggcaacatgaccagactgangtcctgcagctatgacacatattgcaaactttattgggtataa

SEQ ID NO: 503 - DNA, 425 bp, Ctenocephalides felis
  misc_feature (317)..(317): n = unknown
  misc_feature (340)..(340): n = unknown
  misc_feature (346)..(346): n = unknown
  misc_feature (378)..(378): n = unknown
  misc_feature (385)..(386): n = unknown
  misc_feature (394)..(394): n = unknown
  misc_feature (400)..(400): n = unknown
  misc_feature (405)..(405): n = unknown
gatcggttgcaatttgtcattgcaccaagcataaattgatgggtccggtgcataggttataaaagaattgggatttgtgcatttcatgacggtgcaatcagcttctgacgatttctttttacacatatttttagaatgatcatatacatagttaggtgggcattcgaaaacctgacctttaccatctttgcagaataagtatcttggtgcagtctttcggatctgggctgatatcctacaaccgcgcatgtagtttctgccgtcttacagttttcccaaaggttttgatgaccacatatcatctacacaaaatggancatcggaatttgagtctctgcanttgatngttgtaattggggtttcttgtcaagcgcacancttcaanntagaccantcgtgncaaangttcccaactgcttattatt

SEQ ID NO: 504 - DNA, 203 bp, Ctenocephalides felis
gaattgtttgagaattgctcagtgttaatcctttgagatgtggatcgaaggattgacaaaagtctctgaattctgtcagtgtggggcctaatgttaagtcggagtgcgtgcaatttaaaagaagacttagaattgcttgggttgcacatgcattgttgatcacctgttttgcaaagaatattttatcgagtctaccatcatgt

SEQ ID NO: 505 - DNA, 317 bp, Ctenocephalides felis
  misc_feature (261)..(261): n = unknown
attggagaatttggatttttcttaacacctatgataggcaaacaaaaagtagcttttaattcaggatgggtaacatgtgcttttttgaacctaagagccataggtctgataaatctttcgaattttggaggtttacgtgtaaagccttcaccaacaaaagtaacttttgtaaccattctcttccacgctttccttctggactttcctgatgataaaactttgaatacttcagcatctgcctgagctctgacttttggatangcacatcccattttccggccttctctttacgtttctgtttgatcatattagagagt

SEQ ID NO: 506 - DNA, 518 bp, Ctenocephalides felis
  misc_feature (7)..(7): n = unknown
  misc_feature (26)..(26): n = unknown
  misc_feature (50)..(50): n = unknown
  misc_feature (69)..(69): n = unknown
  misc_feature (81)..(81): n = unknown
  misc_feature (180)..(180): n = unknown
  misc_feature (202)..(202): n = unknown
  misc_feature (357)..(357): n = unknown
  misc_feature (371)..(371): n = unknown
  misc_feature (407)..(407): n = unknown
  misc_feature (411)..(411): n = unknown
  misc_feature (427)..(427): n = unknown
  misc_feature (433)..(433): n = unknown
  misc_feature (452)..(452): n = unknown
  misc_feature (463)..(463): n = unknown
  misc_feature (474)..(474): n = unknown
  misc_feature (493)..(493): n = unknown
  misc_feature (495)..(495): n = unknown
  misc_feature (507)..(507): n = unknown
  misc_feature (509)..(509): n = unknown
ctctaanaatcattgacgctttttcntttctttcactgcctttgttttanatggttgtcctcggttcanaaaagacgtaangacttctgacatttctggcatatcagacatctttgtgaaactgctgagttgctccatttcctttttagtttcaggatcattcatcattttcggtaaaancataattaataataatggcaanaccatcattaatatcatatgattgaataggaaatcagtgattttccattgttcccttacttgaaaatatctgaattttcctaatgtctttaatcttaaagggtatggcacttgtatgacttgagatgtttgtaagtgattcactttgcgtgctcngaattttcctttanagttaatttctactctaacaggctcatacatataanttgngttaactgcatccaanacgtangatccagatgggacattanttataacaaangtgccgtctcnttcaaaaaacctctgtatnancccccgttcaanantattttggt

SEQ ID NO: 507 - DNA, 373 bp, Ctenocephalides felis
  misc_feature (8)..(8): n = unknown
  misc_feature (13)..(13): n = unknown
  misc_feature (170)..(170): n = unknown
  misc_feature (354)..(354): n = unknown
ttttttanctaantgtatgtcagaaaatgtcactaaagcaacacctgtgatgcttaaacaaactgcaattaatttggatatagtaaatctatctccgatattacaagggaataaagcagctaaaacaagtgtgaataaacttgacgttgaagataaaactgtaaccgtancagcttctgtttgtgataatgccagctgaaatgtgtaattagcagcaaaccacaataagcagaataacaaagcaatttttgctattctttgtgtgggcaaacgatttgcggcccgccgtgcagcctcgcttgcccttaaacttgcgtgggaagataatcttgccaataatgcttctgttgctcnattatcacgcatttgccgt

SEQ ID NO: 508 - DNA, 430 bp, Ctenocephalides felis
  misc_feature (29)..(29): n = unknown
  misc_feature (89)..(89): n = unknown
  misc_feature (179)..(179): n = unknown
  misc_feature (219)..(219): n = unknown
  misc_feature (224)..(224): n = unknown
  misc_feature (238)..(238): n = unknown
  misc_feature (251)..(251): n = unknown
  misc_feature (306)..(306): n = unknown
  misc_feature (320)..(320): n = unknown
  misc_feature (335)..(335): n = unknown
  misc_feature (362)..(362): n = unknown
  misc_feature (372)..(372): n = unknown
  misc_feature (389)..(389): n = unknown
  misc_feature (403)..(403): n = unknown
gtattcaatggtatgaattgcttggtgantgaaaatttcactcatgggttcttcttcgtgctctccatgagctgcttttggcggtgccnttggtgcctctggcataccgttttcttggctggagacaacgtctgaagtcatttccattccttggttcaaatcaccatttgatttagcanaatgaggaacttcatctttatttttcttggttgccatcanatatnatggtttgcccaangagcatgagcggnatacagcagagcccaattaacacaaatattttttgaatttgctgttgtccttcanacataaattcatcncaatgttctgctggngatccttgcttgaataacatcatgttnatgaatcagnatcaaaactgatggtgngcagcatggttcanatctgatgtccgtactatttgcagagt

SEQ ID NO: 509 - DNA, 498 bp, Ctenocephalides felis
acactgtcagtaatattgataaaagtggtgagcaagacggaaataatgtgcagcctactgacattgcagatgacttaaactgtgttgatgtggatagtgttgacactgaaacttactcgaaatgcgacaaaaacattaaacttattgataaaccactcaagaagcaaattgtagttttatcagaaaatgattttgatgacggctgtccaaaatcgaatactaataataataacgaccccaaagaaatttcttctcatatttgctaccttcaagatagcgattttaataccagatcagatttaagtcggatcatgactccgaaacatatttcaacaccagaaataccaaagtctaacgcaaataattatgcgactttagatcagagtttccatttaggtcaaaacgttcaaaatgcgcaaattaacaaaaataaatacatttatatcgatcctaataaaattgaacaagattttaacagcaatttaaataatttaaaca

SEQ ID NO: 510 - DNA, 500 bp, Ctenocephalides felis
  misc_feature (43)..(43): n = unknown
  misc_feature (57)..(58): n = unknown
  misc_feature (102)..(102): n = unknown
  misc_feature (225)..(225): n = unknown
  misc_feature (273)..(273): n = unknown
  misc_feature (359)..(359): n = unknown
  misc_feature (450)..(450): n = unknown
  misc_feature (463)..(463): n = unknown
ttttttttttttttttttttttttttttgttttagatggttgncctcgggtcaaaanngacgtaatgacttctgacatttctggcatatcagacatctttgngaagctgctgagttgctccatttcctttttagtttcaggatcattcatcattttcggtaaaaccatgattaataataatggcaacaccatcattaaaatcataggattgaataggaaatcagnaattttccattggtcccttacttgaaaatatctgaattttcctaatgnctttaatcttaaagggtatggcacttgtatgacttgagatgtttgtatgtgattcactttgcgtgctctgaattttcctttagagntaatttctactctaacaggctcatacatataatttgagttaactgcttccaatacgtaagatccagatggaacattacttataacaaaggngccgtcttctttnaaaaaccctctatataagcccccgttcaccaatattt

SEQ ID NO: 511 - DNA, 208 bp, Ctenocephalides felis
  misc_feature (157)..(157): n = unknown
  misc_feature (201)..(201): n = unknown
tttttttttttttttttttttcgctttataaacattaatatatttgaaaaatgatatttacataaaatgatttctctcaatgaaatttaaaaatttcttaatcgttttaaaaaaataaatttatgaatcccatttcttatactccattccatctggnggacgaacctcaaccttctctttgcccacctcgttccaatttgngctaagt

SEQ ID NO: 512 - DNA, 355 bp, Ctenocephalides felis
tcaatatggttcaccttaataacattatctcaatatcactttatgttctatttaagcaggcctttaccaaatattttagctctgccacttgtcttattagcagttaaccattggttgaatagtaaagaaaaatattttatcatttattcggcatctgcaatattaatatttcgggctgagttagctcttctactgggattatttctgctatatgatcttattcaaggaagagttcagattttaagattaattaaaatatgcttgccaacagcagctattttaatcacattgactgtattagttgattcattattctggggacgactagtgtggccggaagcagaagttttgtggt

SEQ ID NO: 513 - DNA, 518 bp, Ctenocephalides felis
aattttggtaatactttgaaatatattcttaaattaaattctttaacatatacataccactttattaatggagttttatttggcatgctaattcttccattaccttggtgattcattatgtgttagattggcgcctgtatttattaggacgaagaaaattgaacatgccattccttctattattttttatggcatttggtgtggtattgtcactaccatttggtgtatctgaagtttctcttgtgtcagacaaatgcaacaaagtcgcacgacctccatctaaacgactaggcccccaacctgaagtgtatgcatattcaccagtatgccttcgcagactgtcattagcatgtgatccatttgctgaaaggctgtttggttgagacctatgccctgcatccatttcatcatgagaaattgtattccgatgataatcagggtttgttgatgttctaattggcacaggtggaggcggtggtctaacgctgacagtgacagtatttgaatactggggtggt

SEQ ID NO: 514 - DNA, 382 bp, Ctenocephalides felis
  misc_feature (70)..(70): n = unknown
ttccggatttttggtcaatactttagctagacgttctgcaggaatgccgtatcttctcaaatttgcatcncttaaaactacgacaattgcctcatcacaatcttctttagccagggtatcaatagctatatttgttgcgtctaatgtatgatccccagaccaacaaaattgagcatgtgcgtgcatcatttttattgtttccaatctagctttttcatttttaggtggtcttgaatgattaacaaattctagagcatctgcttcaccgctgtgaccaaatatatcatactggaatctatcttcgtgaccctcaaaactttccatcagaagaactactgcttctaattgctatctaagcgtccatcatatccattaaatctgt

SEQ ID NO: 515 - DNA, 489 bp, Ctenocephalides felis
  misc_feature (53)..(53): n = unknown
  misc_feature (91)..(91): n = unknown
  misc_feature (256)..(256): n = unknown
  misc_feature (268)..(268): n = unknown
  misc_feature (437)..(437): n = unknown
tcaaattagaggagggaaaccggcaacagcttgaagagaacacaattccttgntgcctctaaagtgcagtcaactttagctacgttaatgntagttgaaccgacaacctttttagctaagtcatcccaagtaggtgctaaccttttacaatgtccacaccatggtgcaaaaaacttgacaaaagtcacaccctttgaaatgccttgttcaaagtttgatcccacaagattaaagacaccttcttcttcattagtgnctggaatgcgantatcatctctatcttcatcatcaatttgtgaagcaccatgtttcttctcaacataagcctttaattcttcgtgattcctttgccagagtatttttccacctttttccatcttcaatccataataaagtaggataaccttttacttcaaattgtgtgcaaatcgggcggnggtgagtgcagtcaattttagtaatgcttacagagtcttcatgttcaaaagt

SEQ ID NO: 516 - DNA, 309 bp, Ctenocephalides felis
  misc_feature (53)..(53): n = unknown
  misc_feature (92)..(92): n = unknown
  misc_feature (211)..(211): n = unknown
  misc_feature (226)..(226): n = unknown
  misc_feature (307)..(307): n = unknown
ttttttttttttttttttttttttttttttttaatgatttaattaatttattntaagccaataattgatattaattatgcattaatcattgnatttatactttcctagaaaactatacatcacatgttgaaacaaattaaggttcatggcttctcgcctttccttagcgcttgttttaaatttgatccattctttccgaatcttgttactntttggtccccatttntcattgggagtgaacacgtttttcaatgtatcattaatggaatgttttctatttttcaaatatatccaaattgcccaaagngg

SEQ ID NO: 517 - DNA, 215 bp, Ctenocephalides felis
  misc_feature (34)..(34): n = unknown
atctacaacagcaccgataacggcaacaactttnccttgggcacctgctgctgctttggcagcataactcctgctgttcgataaaatcgatgcgattttacccgattctgttttgctcagggttcgcaaagtggaattgattacggagtgcatcttgtaataaaatgtatagccagttgagttgaattaaattgatctcacctgtaagctactgt

SEQ ID NO: 518 - DNA, 275 bp, Ctenocephalides felis
agcaaaacgtttccataactaggatatcctacttgaaagtgatggctattgttggtacttattgcatttggtccaaaaatctcaggcttataatattggcccacagaagaatatcctggcctgtactgagaaaatgcgtaaggtggtggatggtaatcacagttcgcccattggacaatcgagatggccaccaaaaatattacagctttcattttagtcacttggtgaaatatcacgaattgaaatatttcaaccttcgcaaaaggagcttgtga

SEQ ID NO: 519 - DNA, 498 bp, Ctenocephalides felis
  misc_feature (183)..(183): n = unknown
  misc_feature (196)..(196): n = unknown
  misc_feature (209)..(209): n = unknown
  misc_feature (214)..(214): n = unknown
  misc_feature (231)..(231): n = unknown
  misc_feature (285)..(285): n = unknown
  misc_feature (293)..(293): n = unknown
  misc_feature (298)..(298): n = unknown
  misc_feature (300)..(300): n = unknown
  misc_feature (307)..(308): n = unknown
  misc_feature (310)..(311): n = unknown
  misc_feature (318)..(318): n = unknown
  misc_feature (328)..(328): n = unknown
  misc_feature (340)..(340): n = unknown
  misc_feature (346)..(346): n = unknown
  misc_feature (354)..(354): n = unknown
  misc_feature (356)..(356): n = unknown
  misc_feature (360)..(360): n = unknown
  misc_feature (362)..(362): n = unknown
  misc_feature (367)..(367): n = unknown
  misc_feature (369)..(369): n = unknown
  misc_feature (407)..(407): n = unknown
  misc_feature (417)..(417): n = unknown
  misc_feature (435)..(435): n = unknown
  misc_feature (437)..(437): n = unknown
  misc_feature (439)..(439): n = unknown
  misc_feature (458)..(458): n = unknown
  misc_feature (464)..(464): n = unknown
  misc_feature (467)..(467): n = unknown
  misc_feature (469)..(470): n = unknown
  misc_feature (482)..(482): n = unknown
  misc_feature (496)..(496): n = unknown
  misc_feature (496)..(498): n = unknown
agtattagcatcagcccggacaacaacgcagtaggatgttagcaacattattcaaggatgaaaggtgtcaacatctaccagcatattcaattttggagaaaatgtatttagatcaaataattcgcagatctgacttgcaggagtttgaagcgcttttacagcctcatcaaaaggcatctactntggatgggtcatnaattctggatcgngctgngtttggacataatttgntttctggcagcaaattgtataataatataacttttgaagaggtaggatctttanttggaatnttagntngcaaagnngnnaaaattnccgccaatgntattaaaagggngaatgnatggggcntnaatnanattgntnacattggccttgggcgcgaaccccttaggcgaattttnggatattcantacactgggggcggttgngntntgttttaggggccaattcncttatnggngnngtttaaatactngcgggggttacaannn

SEQ ID NO: 520 - DNA, 498 bp, Ctenocephalides felis
atattttgtatagtttcttttgttgaatacttcatcaatatattaatataatttaggtttcctctcgcaagttcctgtgtcgcagctttgagtagcttggttaaatactgttccaatcggacattgatcaggaactggctctcctttaggacgtaaacacgtgaagaacttccggcatgttgcgtcgttcttgaaagcaaattttccacgtgctcggcattgcccgacacaggtttcgctccttggggaaaactcggcgggttcttcgcattgcaatacggttcctcttccggccatacatacgacgtacaatgatttatcaccaatgtacggaagcaccttaggctgtgcaggacatgtaactgtatagcattttgtgcccagagccataggtccgcaattatgacgtaacggatcatatgcaaaatttgcggggcaataatattgggttcctatactattttcgtcacaataataatagctttgacaatcatttat

SEQ ID NO: 521 - DNA, 500 bp, Ctenocephalides felis
  misc_feature (10)..(10): n = unknown
  misc_feature (38)..(38): n = unknown
  misc_feature (451)..(451): n = unknown
  misc_feature (477)..(477): n = unknown
ataacaatantttgagacagcaaactgaatcctgtatngattttctttgtccttggtgcagtctgaattgcggattattatattcgctactgaaacatttgaaactgtgccatgctagatttacctttacatatgtgccattaacacaatgtgctagaatagatgtagctataaacgagttgtatgatggttcttatgttggggcacctcaagatttgctaggcccttctggatttgcattttcagggaatggaccgactcgaagaactattgttacacatatattagtttgccgaccaagaagaagtaaacccagtttatcagaattcttggaattggatgaaaatgaatgcgacagccaaagaccttacattacaggtcacaatcgctgtatcatcatacaataacatgcctaccgattcagctaaagaactagatgttgattcagaangagaaagtgatcctttgtggttaagnaaaagacaatgtgatgatagacg

SEQ ID NO: 522 - DNA, 312 bp, Ctenocephalides felis
  misc_feature (2)..(2): n = unknown
  misc_feature (21)..(21): n = unknown
  misc_feature (25)..(27): n = unknown
  misc_feature (34)..(34): n = unknown
tngaaaacttttttaggcccncaannngagcggncgccgggcagggaccaggatattcatccatagcagctttcaagtattcttcaagatctttttcaaatggtgtattttcaataataggcacacacaattcttcatcatatcttaaatttctttttagtgaatagctataaataccctttatcatttctaaatgagtgcatttaaaaacttttcaggacattttaatgtaactaaaactgcagcagaagaatgtgtatgtattacagcacccgcattatggtttctgtatgcaagcataaataatggtgt

SEQ ID NO: 523 - DNA, 258 bp, Ctenocephalides felis
atgaacgtatattatattgagtggcaataatttaattcatgcaaatcataatgataaatttgtaattgtttagtttcaagaaattgtaatattgtaattcatgtaaataattgattgcattccaaaatgtttttatttttgtttttattttaatagttttatttaaaatgttgttgttgtattatatattcagtattttaaaaaataataaatttactcccgttgctaaaaaaaaaaaaaaaaaaaaaaaaaaaaaaa

SEQ ID NO: 524 - DNA, 204 bp, Ctenocephalides felis
cagttaatgatctacaacttgttcaaaaagccttaactgatggatcgaacgcgtgtggaagttcaatcgaatccttcctaaatgttattgaaactgaagaagcacctccaacctttaatagaactaacaaattcactcaaggtttccaaaacttgatagatgcctacggagttgctagttacagagaagtaaatccagctctgt

SEQ ID NO: 525 - DNA, 500 bp, Ctenocephalides felis
  misc_feature (436)..(436): n = unknown
ttttttttttttttttttaattgataaattttatttaaaacttgcaaaaattatttaaacaatttacgcatagcacatttcgctcgtgcaaatctcttcctcgcattccagacaagtttccttatcgcatttgtaggtgtcggtgcagcctctcttcactttatctccgtcaatatctaagtagcatttgcccatgcatttggtcttcgtctcgactttttcagggtcgtcaaggcaattttcatcattttcatcacaagaaacacattcgtgttttttggcatcaccattgcattcgtttttgtcacaagttgggcaacgttctggttttttctcgcacatttttttcagattctggttcttgaacaggttgctggtgcaccctaattttatggcatcaccttgtgcatttaaaatactcaaacaagtatcttgnggcttgagacaaacttccttggcatcatctttagcgttgcaaaccctgcgattcttgggaaaac

SEQ ID NO: 526 - DNA, 259 bp, Ctenocephalides felis
cagcagctccagcggctgcagcggctccagcagccgcaattccgccagcggcgttggctccaccaccggcgccccatgctccaccacctgctccgctaccagctcctcccgctccagcgcctgctccgccagcacttctcgcagaacgggcgagagtatctccagccgcctgttgggaactgaacgattgagcattacttccgccatatcctgaagaaccatatgcggatcctactggaggcacatatgcggtgttagt

SEQ ID NO: 527 - DNA, 549 bp, Ctenocephalides felis
  misc_feature (4)..(4): n = unknown
  misc_feature (439)..(441): n = unknown
  misc_feature (445)..(445): n = unknown
  misc_feature (450)..(450): n = unknown
  misc_feature (459)..(460): n = unknown
  misc_feature (464)..(465): n = unknown
  misc_feature (468)..(469): n = unknown
  misc_feature (475)..(475): n = unknown
  misc_feature (484)..(485): n = unknown
  misc_feature (493)..(493): n = unknown
  misc_feature (496)..(496): n = unknown
  misc_feature (500)..(500): n = unknown
  misc_feature (502)..(503): n = unknown
  misc_feature (508)..(508): n = unknown
  misc_feature (512)..(512): n = unknown
  misc_feature (514)..(514): n = unknown
  misc_feature (519)..(519): n = unknown
  misc_feature (523)..(524): n = unknown
  misc_feature (526)..(526): n = unknown
  misc_feature (534)..(534): n = unknown
  misc_feature (541)..(541): n = unknown
tgancgcccgcagaaaaccgttcgacgcgataatctgttaactggcggtgaattttacggtcaaaaagattcaaggtatggtaatttttctaattgtgaacaaagtctaagaagtaccaaagttgaacatacaaggcggtcttctaatatttctcatatttcgtttggagaaggttcttttatatcatctacaacttacaataagcataggggcccttgcccagctgctttattggaaactaataaagcaccatttaaatatacacgtcaagtgaaggcgcataaattttatgtgcctaaagttgtcacggaaaaataggaagcctttaaaatatcattcagaatttatttacttatcaatgtcttccattactgtatatacttatatatatatatatatatatatatatatatatatatatatatatatatatatatnnnatanaggtnacaaatatnncgcnnatnngagagngcgcgcgcnnatattgtntcntacncnnatatnttgngntatanaganntntatatatntggcacnttatatgc

SEQ ID NO: 528 - DNA, 549 bp, Ctenocephalides felis
agataattgtaacccagtttttgatgaatcattcgaatacataatttctcaaggagaattgtcgacgacgcaattggaagtgacggtagctacgcagaaaggatttttatcgggaggtagtcctgtgatcggtcaagtgattttagatctgaacgattacgatttatctcaagcttcaacccattggctggatctatgcccagaatttaagtcataaatgtggatcattgctttcgaatttcaatcaaaacatgcgtatgctattaaattaaatgtgtaattctacctttaatttttgctcctacagtttaaatttacgtttgttatttttaggtataaatatacgctttattttgttattttataaattatcaatatttaataatgcttttatattacaaataatacttatgtgttgcacaaatttggtatatagatgtatatactgtactaatatttattttttcaacataaatttcttttgcatgtgccttacattctagatattcaattatcttaataagtcttaatcttaaacttattatgcgc

SEQ ID NO: 529 - DNA, 441 bp, Ctenocephalides felis
cagttaaataataaggagaagatggattacaataaagcacaaccacttcaccagcaatcacaatttggtggaagacctcaaactcaacaaccaggaccactcagagcgagtgcaatgcaatcaaaagcactcctgcaagttccattctcacctgcaaacagttgtccaaattgtggtgtcggcttcgtcactgacaattactcctgctgcgcggtctgcctaggagcatgctgctttcctctgggacttctgtgctgctgggaatgaaggagagatcctgcgtcaactgtggagcagcttttaactaggatatagagaaaattatgatttaatgtctttgtaactgtcatttttattacttgattttaaatattagatcagatgtttcattttatgaaatacaaaaaatatatattaagaagaaaaaaaaaaaaaaaaaaa

SEQ ID NO: 530 - DNA, 549 bp, Ctenocephalides felis
  misc_feature (509)..(509): n = unknown
  misc_feature (529)..(529): n = unknown
gtttggcctttgtctttcaaaatattaattttccaaaaacatataccaaacgtatttgcacaaaatttattgtacgttttagaatagtatataaaattcatgtgtccataaaatattataaataagtaaatttccaagttttcacacaaattattgagtaagccgaagcctctttaatgcgccattgcgttttaattatagtgttttaaacagcaaaaatcttgattctacatcattaaaatgagcttcaacgataaacagtcgaattcattcccaaaagatgaatgtgcaaatcgattagaaggattgcatgtacagagatctgacatgaataaattgataatgaattatcttgtcacagaaggctttaaagaggccgctgaaaagttccaaatagaggccggtgtaggtacttcgatggagttaaattctttagacgatagaatattaataagggatgcatacagtctggacgtatcaagaagctcagtattagtaatcagcttatnccgagttgtggatacgcagnatcttattcattgcacactc

SEQ ID NO: 531 - DNA, 550 bp, Ctenocephalides felis
tattcatttataaataaagaaatatgtctttgccagagccacttcaaaagttgttcagccacatcgaccagaataagaaaaggtacattgatgtattatctgaagctgtagcaatcaaatcagtgtcggcatgggcagacagtcgacaagaagttgttaaaatggttaaatgggctgaacaacgattgaaggctctcggcgcaaccacagaattagcagatgttggaaaacaaactcttccagacggcagagttattgacttacctccagtattgctgggtcagttgggaaatgatcctaaaaaacatatggtatgtttgtatggacatttagatgttcagccagctctgaaagaagatggttgggatactgaaccatttgtattgactgagaaagatggaaaattatttggtagaggagctagtgatgacaagggtccgttatcggtggattcatgcaattgaggcttatcaacagactgacaagatttaccagttaacatcaaattgttttgaaggctggaggaatctgtagtgaaggatagatgatt

SEQ ID NO: 532 - DNA, 550 bp, Ctenocephalides felis
  misc_feature (299)..(299): n = unknown
  misc_feature (319)..(319): n = unknown
  misc_feature (325)..(325): n = unknown
  misc_feature (343)..(343): n = unknown
  misc_feature (360)..(360): n = unknown
  misc_feature (367)..(367): n = unknown
  misc_feature (369)..(369): n = unknown
  misc_feature (374)..(374): n = unknown
  misc_feature (377)..(377): n = unknown
  misc_feature (391)..(391): n = unknown
  misc_feature (409)..(409): n = unknown
  misc_feature (417)..(417): n = unknown
  misc_feature (419)..(419): n = unknown
  misc_feature (430)..(430): n = unknown
  misc_feature (433)..(433): n = unknown
  misc_feature (468)..(468): n = unknown
  misc_feature (472)..(472): n = unknown
  misc_feature (474)..(474): n = unknown
  misc_feature (478)..(478): n = unknown
  misc_feature (480)..(480): n = unknown
  misc_feature (487)..(487): n = unknown
  misc_feature (518)..(518): n = unknown
  misc_feature (529)..(529): n = unknown
gtcaaacgtgacaatgacatcatacatagatgatttttacctggcagaagccaaaaaagaaattggaaatgatctatacaaagagaaaaattatcatggagccctacaacaatattcaaaagccatcgtcctatatccagattcttcatcttactatggaaacagagccgcctgttatatgatgctttttcaatataaaaatgctatggaagatgcaaaaaaagcagttgtgctcgatccaaattttgctaaagcatatcttcgcattgcaaaatgcagcatattggtagatcaccggngcaaataactaacctgaagnggaatntgcattaaggcaagtggnttaaattggccttgccncctttanantattnccnttgtaaccaagaanagaaaatttggggggttnttttggcntnttttttggggnaanaccacgtttccccaaaaatacccctttataatttntgtngnggtngnaaaaaancccccccccccttccccggtttttccccggngttttttgggnctcccgaaaaaaagggggggc

SEQ ID NO: 533 - DNA, 549 bp, Ctenocephalides felis
  misc_feature (461)..(461): n = unknown
gtttcacattcagtcgatctgtgagtttaatctgtaaacatctgtttcatcaaaaagtttcagcgaaattaaaataatggcaaatggaatgccggagttgggctccaagataagcctcatatcgaaagcagatatcagatatgagggtcgccttttcactgttgatcctcatgaatgtacaattgcattagcaaccgtacgttcatttggaaccgaagatcgagataccccgtttccagttgcaccgcaaacgcaaatatatgattatattttgttccgcggatctgatatcaaggacataagagttgtcaacaatgtcaataatcctgtgcccaatgaccctgcaattatgcagttatcggtgcctccaagccttggccaacctacttatcaacaacccggatatacccatccagttcttggagctgtatggggcaatttggaggtgcttatggaatggnggttgccacaaagtatgccgctggatggcaatagaccagtggcaaacaataaatgagttgcgcgggaggatggcagctatcacacaga

SEQ ID NO: 534 - DNA, 549 bp, Ctenocephalides felis
  misc_feature (3)..(3): n = unknown
  misc_feature (34)..(34): n = unknown
ctncgaagtgctcttactatatttgttatagggnatatatatttaagtatattgaagaattgaaccgatggcaagcccagttgtgcgaaaatcgaacaaggacgaagtaaataaagaaattgtcagtatggatgaagtagctaaagatgctaaaaattttattgaacgcattcttgggggatgtgagcaaaacctcagcaactaaacaattagtcattggttcattatcaggatggacaactggatttgttactatgaggattggtaaattggctgctcttgccgttggcggtggtattttaatattacaagtagctaaccacaaagggtacatttctattgactgggataaagtaactaaaaaggctgataaggtgacagataaaattgaagaggctgttactggagaaactcctaaattaatggataaaattgagagatttgttgataggaaaattgacaaagcagaggaattgctaaagaaaaatcaaagaaaagccaaaaaatggatcacggcttcaggtgaagaagaattaaattgcaagaaat

SEQ ID NO: 535 - DNA, 549 bp, Ctenocephalides felis
  misc_feature (33)..(33): n = unknown
  misc_feature (516)..(516): n = unknown
  misc_feature (537)..(537): n = unknown
  misc_feature (542)..(542): n = unknown
gcagctctaacagaagcaaatgatcagaaaagnagtaaaaaacaaaccttaagcagcctaagagcacaaatgggtttactaattagtcgaaaagattcacctgtagcagtctcaaagcctcctgtattcagccagagtggtaatgttagcaacacgacaccacaaaccacagttcctggatctaacatacattcagcacaagttaggaggagctctagactttttacaaataattactcagttaaagaaaataataaatctccaaatagaaataaatttgccaccccaaaatctcctagaaaaccaaagcaacgtttaacaaagactaatttaggtaaaacaaattacgaaataactgaaaaaacagtagataaagaaaaagtagaaactataacgtctgatcaaaaagttttgctgaataatagtataaactctgacaaacatcagcgcagcaactttagttttgcaaaacaagtgtgatggactctgttcttttaagacagtaggcaagcttantatgttaacccaattcgtgcnaagantgtgtgt

SEQ ID NO: 536 - DNA, 409 bp, Ctenocephalides felis
cataatcatactttggatctaaaactaactctgtgttatttagaactgtagactcattataattaatgctccaaccactgccgaaaatatttatcgatattgagaaaatatcattataaataaatccggtatacatggagaaaatgcccatcaacaacataatatagcgtccagaaaaaaatatgttccacgtgtcatcagttatgtttttggctattaattttttctcgttgatcaccaaaacagcggcaaatattaaaattataagaccatgaccaatgtcgccgaacatgactccgaataaaaatgggaaggtgatgatggtgtatagtgcagggtttgcttctctatagctggctatgccataagaattgatgagattctggaagccctgagtgaatttatttgt

SEQ ID NO: 537 - DNA, 166 bp, Ctenocephalides felis
atagctgatcctgacatacgttcagctgttacgacaggaccagaaacggcgtatacatagccgaattttccctctcgctcttcatccgagattttattaagttcttgaggcattttggctcctttggttatttgtcgttttaaaacacactctgatcctgttcgaa

SEQ ID NO: 538 - DNA, 135 bp, Ctenocephalides felis
  misc_feature (4)..(4): n = unknown
tgantgcgggtgctctggaggaaccaaaaacctactcactttataagggcttcatacatctcggcgctggtttggccgtaggattttccggcttggcggcgggttttgcgattggaatcgttggtgatgctggag

SEQ ID NO: 539 - DNA, 79 bp, Ctenocephalides felis
tgatgattatgaacaagttaaagctgtagctgaatattatgctgagtattctgctttattcgaaggctctggcgatggt

SEQ ID NO: 540 - DNA, 140 bp, Ctenocephalides felis
  misc_feature (90)..(90): x = unknown
  misc_feature (117)..(117): x = unknown
  misc_feature (131)..(131): x = unknown
gtaggggcacaaattccacgaagtttttgtcatagaagtcatccaaagcacgcatatatttactgtatgaaatcaaccaattgattgaanggaaatgtttcctttgagctaatttcntatccaaaccccanaacacttgt

SEQ ID NO: 541 - DNA, 462 bp, Ctenocephalides felis
  misc_feature (23)..(23): n = unknown
  misc_feature (36)..(36): n = unknown
  misc_feature (426)..(426): n = unknown
  misc_feature (431)..(431): n = unknown
  misc_feature (442)..(442): n = unknown
ttttgatgtcatataaatgccancaattaaaccaantagaccaatagcagaaccaaagatttcaacaatgagaattttgacaaatagtgcagaattggcagcatcagcaagagctgctccagatccaacaataccaacagcgataccgcagaataaattcacaagaccaacagccaaaccagctccaaaaagaacataaccacccatccaatttgcttctttatatcctgctttttcaaaaacagatttgtctgtgtattccgctaacagtcctgacagaacaattgctgtaattaaaccataaatagcaacagcttcacagaaaataactgaaattaagttttttgttttgattctgggcgctttcacaccacctcctacaatggatgtgcctgtggtatgaattccaacaagctgctccaacanctganaatgctacggntaaacaattcctaagggagc

SEQ ID NO: 542 - DNA, 396 bp, Ctenocephalides felis
  misc_feature (52)..(52): n = unknown
  misc_feature (368)..(368): n = unknown
aattggttggtaaagcctccttgggcggaaactgacaagatcacacttgaanttgccaagctcttgaaagacgatttcctacagcagaacagctactcatcatatgatcgtttctgccccttctataaaacagttggtatgttacgtaacattattgctttctatgatatggcaaaatacgcagttgaatctactgcacaaagtgaaaacaagattacctggaataccattagagatgctatgggcaatattctatatcagttgtcctcaatgaagttcaaggacccagtcaaggatggtgaggcaaagatcaagagtgattttgatcaattacatgaggatttacagcaagcattccgcaacttggnagattagattattgtgaatataatatgt

SEQ ID NO: 543 - DNA, 283 bp, Ctenocephalides felis
  misc_feature (2)..(2): n = unknown
anacactttgtctttgttaatttctgtttctacgtagcggagctttctctccatctcatcacaacgcctgacttcgttgacgaatttacgttgaaatgaattaacatcaacattcaagtctctaaattggacggttccagcttctcccaattctgaaactgaagtgtaagcagcttcaggctgaataaacatctggcataaagccatctcctcacttcgaaacatagcccccatgatgtggcctattcaacacccgctccttgatacaaaataagcgggttgc

SEQ ID NO: 544 - DNA, 346 bp, Ctenocephalides felis
gacattttagaactttcaacaaagatatgttcaacacaacaacagactatgtaaaaactgtatacatatataatggaatattttttgtatcataattaaattgtaaatctcatgatttactaagcgttgacattaacagtattagcagcagctcctttagtttcactggtttggtccttctcgagttgcttgccaaggtattcccaattatgaaccattaatttctggactgccaacaaagcttcatatcttacatttggttcctcatatgccaataattgcataaccagttgtttgccaccaagctgttcgatgatatttttgccacgtggataatgcctgacgt

SEQ ID NO: 545 - DNA, 498 bp, Ctenocephalides felis
  misc_feature (486)..(486): n = unknown
atgtaacctgggaaaccacgacgtccgggtacttcttcacgggcagctgatacctcacgcaaagcttcagcatatgaggacatgtctgttaagattaccaacacgtgcttttcacattggtaggccaagaattcagcagctgtcaaagccagacgtggggtaatgatacgttcaatagttggatcattggccaagttcaagaacaggcacacattctccatggaaccattctcctcgaaatcttgtttgaagaatctggcagtttccatgttgacacccatagcggcgaacacaatggcaaagttatcctcatggtcatccaaaactgattttcctgggattttaactaaacctgcttgcctacagatctgggcagcaatttcattgtggggcagaccagctgcagagaaaataggaatcttctgtccacgagcaatggagttcatcacatcaatagcagagataccagtttggatatttcctcangatagatacgag

SEQ ID NO: 546 - DNA, 393 bp, Ctenocephalides felis
  misc_feature (61)..(61): n = unknown
  misc_feature (69)..(69): n = unknown
tctccaatatcaaagcaggctacagacagaacaaggggatcacgagagctttcaagtaagnggatcaanatacgcaataactcataattcttctcattgagacgtggggcattctctctccagaacttagcagatttgtgaacaggtgaccattccaatctgccggacttgatttctgtagcatattcatcaaatgagctaaggtcttgaatggaagcttgtaatttttcggtcaaatattcaacatcagcaacgatatcctcatcatctgaacgtctttgttccaggatggataattgtttcaataccttgctttgcaccattgcaatgcaatgctccttggccacctgttgatcttccactttctcaattaaattcctataaacagccagt

SEQ ID NO: 547 - DNA, 649 bp, Ctenocephalides felis
  misc_feature (602)..(602): n = unknown
cgagtacaaggaatgttccagcttatggagcccaaagtattattgaaggtccgcaaagctgatttagatttggtagaatcagttttaactgatgccatggatcagtataaacaacagatggttaccaaagaagttgtcgccactatcaatagggaagcatttttgccagtagaatgctgcggtggagttgaattgagtggacttaatggccgcattaaggtttcaaacacattggaatcccgtttggacttgattgctcaacaattgattccagaaatccgaactgccttattcggaagcaatgccaaccgtaaattcacagactaaatattcatatcaaattacatgattaggatgcaaagtgacctagattcgtattagtaaaaagcatcaagatcaaaatgaatgcacaatcagattcataatgagtgtttttgcatgatacacattttttcagacaatagttcatataattgatgcttccctttgcttcatagtcctatttcaaaaatgttaatagatgcacattccgtagaagttatatagcatgctataattgaatgatgaatattacatttgaaaattttgaatacttaattggnctaaatcataattttctgaaacatgcattttattcaacacttttgct

SEQ ID NO: 548 - DNA, 360 bp, Ctenocephalides felis
tgctcttgtcgcaaacacatctaacatgcctgtcgccgctcgtgaagcttccatttacaccggtatcaccctcagtgaatacttccgtgatatgggttacaacgtatctatgatggctgatttcacttctcgttgggctgaagctttgagagaaatttcaggtcgtttggctgaaatgcctgccgattccggttatccagcgtacttgggagctaggttggcctctttctacgaacgtgctggtcgtgtaaaatgtttgggtaatcccgaacgtgaaggctcagtatcaattgtaggagctgtatcaccgcccggtggtgacttctcagatcccgtcacttcagctacattgggtattgt

SEQ ID NO: 549 - DNA, 357 bp, Ctenocephalides felis
  misc_feature (49)..(49): n = unknown
  misc_feature (51)..(51): n = unknown
  misc_feature (53)..(53): n = unknown
  misc_feature (86)..(86): n = unknown
  misc_feature (105)..(105): n = unknown
  misc_feature (170)..(170): n = unknown
ggattcattcgatcagcttcatcatcatatacatatatatgttttttgngngngatttaataattggcttaaattttacatcttgnttgttttaaactttgttgncaaccatatcgacgttcagtttatagtagacatatggatagtaatcaagcttggccaaaacccanaccaggaatatcaacgttctcagaagcaccggagctttgtagagcactgctgtcaagtgtccgtacaattgattgagcacatctcgtaatctcttgatgctcttcttagatggttgaaggcaacttcagtgaatgcttctgtgcatggatccatgttaaggcgctacgagttttcgttgagtcaagt

SEQ ID NO: 550 - DNA, 500 bp, Ctenocephalides felis
  misc_feature (5)..(5): n = unknown
  misc_feature (31)..(31): n = unknown
  misc_feature (202)..(202): n = unknown
  misc_feature (227)..(227): n = unknown
  misc_feature (252)..(252): n = unknown
  misc_feature (258)..(258): n = unknown
  misc_feature (293)..(293): n = unknown
  misc_feature (298)..(298): n = unknown
  misc_feature (334)..(334): n = unknown
  misc_feature (367)..(367): n = unknown
  misc_feature (410)..(410): n = unknown
  misc_feature (415)..(415): n = unknown
  misc_feature (434)..(434): n = unknown
  misc_feature (453)..(453): n = unknown
  misc_feature (462)..(462): n = unknown
  misc_feature (478)..(478): n = unknown
cactnatttggcccaatttatgaacgtgctngacgtgttgaaggcagaaatggttctatcacccaaattccaattttgactatgcccaacgatgatattactcaccctattcctgatttgactggttacatcactgaaggacagatctacgtagacagacaactgcacaacaggcaaatctacccacctgtaaacgtattgncttccctgtcacgtttgatgaaatntgccattggtgagggtttgacacgnagagancactctgatgtgtccaatcaattgtatgcttgctncgccnttggtaaggacgtgcaggctatgaaggctgtcgtangagaggaagctttgacacctgatgacttgttgnacttggaattcttgcgaaatttgagaagaactttatctcacanggtanttatgagaaccgcacagantttgaatctttggacattngctggcaantggtgggatcttcccnaggagatgttgaagagaatacc

SEQ ID NO: 551 - DNA, 116 bp, Ctenocephalides felis
ccatgtcagtggccaaagttggttgataacctacagcggatggaatacgacccaacagagcagatacttcagaaccggcttgagtgaaacggaaaatgttgtcaatgaaaagaagt

SEQ ID NO: 552 - DNA, 294 bp, Ctenocephalides felis
  misc_feature (264)..(264): n = unknown
caaaggctatcaaaaaatgtcttttctaacaagtgtttacatatttgctttgtatcgaatactatttaaaaaatatttattatacatgcatcaatgatacatattttaaatttacaatacttaatacttttagtaaggtcactatgatttgttgaataatttaaataattcaaaatccattacaaataataaatactgctaaacaattagcaacatactgtatggataatacataaaattactcggagttcaaaaaaaaaaatnaaaaaaaaaaacaaaaaaataatcatgagt

SEQ ID NO: 553 - DNA, 436 bp, Ctenocephalides felis
  misc_feature (10)..(10): n = unknown
  misc_feature (44)..(44): n = unknown
  misc_feature (53)..(53): n = unknown
  misc_feature (65)..(65): n = unknown
  misc_feature (68)..(68): n = unknown
  misc_feature (129)..(129): n = unknown
  misc_feature (131)..(131): n = unknown
  misc_feature (250)..(250): n = unknown
  misc_feature (287)..(287): n = unknown
  misc_feature (296)..(296): n = unknown
  misc_feature (370)..(370): n = unknown
  misc_feature (381)..(381): n = unknown
  misc_feature (391)..(391): n = unknown
  misc_feature (401)..(401): n = unknown
  misc_feature (405)..(405): n = unknown
  misc_feature (409)..(409): n = unknown
tttgcgtctntgggccctgtcacttgctcacgcacaactttcanacgtattgnggaaaatggtgntgnccatgggattgagccaaacaacatatactggctcgattatgctctatgtgatattctgcgngngggcactattcacaattgccatcctagttatgatggaaggcctttctgcgtcttgcacacactgcgtcttcactgggtggagttcatgagtaagttctactctggtttgggttatttgntccaacccttctgcttcaaaactattttggacgcggnggataaggnagcagaataatcaatttatctattatttaaataaattaaaaaacaaattagttataaagaaggtataaaaaagnaaaatattggntaaaaattgnttttaaaagnctgnaagngatttggaataacacttaatttgtagg

SEQ ID NO: 554 - DNA, 223 bp, Ctenocephalides felis
aataagtgttgttaaaacttctttgtattgttccttattacgtgtaacttctcccaaccttttgcgggcttcatccaaaacattcctcacatgatcttcacgaactttcaataccttcaatcgagcttggttgagcatgttggatgattgaattttcttttgcaattcaacttgtttttccttcttctcatagtattccataatctttagtcgctgttgctgt

SEQ ID NO: 555 - DNA, 418 bp, Ctenocephalides felis
  misc_feature (24)..(24): n = unknown
  misc_feature (29)..(29): n = unknown
aattcggtaatactaggaatgtanaacanaaatataatagaacaataattcgatttcaacaaagatattgtattttaattttaatttatattgatcacaaattaataactcgttacattgtaataatactaaacaatctatttacaattaaaaacactcctttcgcaaactttaattctccttcttgatgcgtgtggatgtcattctgtaaataatggagtccctgccagggtccattgtggagatcgagatacagatagcaagtaacgagaagaaaaaggctactccgaaccataaaatgatgttaaaaaccaccgggtaggagtcgttgtattctttagctaggttgaaatcgggttcttttggagcatcatctgcttgccttgcttacgtgttaagacgtcattagagggttagt

SEQ ID NO: 556 - DNA, 289 bp, Ctenocephalides felis
  misc_feature (50)..(50): n = unknown
  misc_feature (65)..(65): n = unknown
  misc_feature (140)..(140): n = unknown
cgtagcccagaccagtaactgagaaattacccgcaaaccacccattgttnactgggcaacgtgtnttggattctctgttcccatgtgttcagggaggaaccactgccatccctggagctttcggttgtggaaaaactgtnatttcacaagctttgccaaatactctaactctgatgtcatcatttatgttggttgcggagaaagaggtaatgaaatgtctgaagtacttcgtgatttccctgaattgagtgttgaaatcgacggcgtaactgaatctattatgaagcgt

SEQ ID NO: 557 - DNA, 549 bp, Ctenocephalides felis
  misc_feature (542)..(542): n = unknown
caaatcctttgacattagataaacgtagtactatttaagcacaaaaaggtataatataataaaatggctagccagactcagggaattcaacaacttcttgccgctgagaaaagggctgctgaaaaagtctccgaggccaggaaacgcaaagcacgcagactaaagcaagctaaggaagaagctcaagatgaaattgagaaatatcgtcaggaacgtgagaagcaattcaaagaatttgaagcaaagcatatgggctcacgggaaggagttgcggctagaattgatgctgacactcgtgtcaaaatcgatcagatgaacaaagctgtatctgttcaaaaggatcccgtgatgtatgaaattctgaagttggtctatgacatcaaaccagaattacacaaaaattatcgcaaagaataatttattttattcagagctccagtgaaaaaataatatatttaataaagattgtttatatccacatttttgcttatgtgaaaaaatcttaatagatcaatctgattttagaaatctagaattttaantagggtc

SEQ ID NO: 558 - DNA, 550 bp, Ctenocephalides felis
  misc_feature (546)..(546): n = unknown
ttttgattgttattactttattttaacaaaataccgtgaaaatcatttggtataattaataaagaaccacatcaaaatgacagagtattggctgatatctgcaccaggtgacaagacctgccagcagacatgggagacgatgaacaatgtcaccagcaaacaaaattcattatctgtcaactacaaatttcatataccagaccttaaggtcggtacattagatcagctcgtaggtctgtctgatgatctaggcaagctcgatgtattcgttgagcagatcactcgtaaggtagcaacatatcttggtgaggttcttgaggaccaacgtgataaacttcacgagaatttaatggcaaacaacagcgatctgcatcttacataactcgcttccagtgggacatggcaagtacccaatcaagcaatctcttcgtaacatctcagatatcatcagcaagcaagtaggacagatcgatgccgcttgaaaaccaaatctcagcgtacacaattgaaaggagtttgcagacttggagaagaacaaactggaanttgt

SEQ ID NO: 559 - DNA, 371 bp, Ctenocephalides felis
tggtattgggagaattaatttgtgtttttaaaaaagttcgtcttttttgaataactgaatgaatgagattttttgggtaacaattttcaattagagttatttttactagggataaattttgtggatggaaagtttggtgagacaacaaaatagcatggtctgtaagggaaataatagtgtttatcttatagtttctgggacagtatgaggaatagtgtaagtatctacccgaccatgtagtttttctataccaatttgttcgaataaagttattagtgttgtaaacggatacatccaagaaattaagcctgttgttattttgtagttcatgtgtgaaaattatattattgttaaaattattgaagagatct

SEQ ID NO: 560 - DNA, 228 bp, Ctenocephalides felis
  misc_feature (55)..(55): n = unknown
  misc_feature (67)..(67): n = unknown
ctcgtaaatcacttggtcaccagtttgatttgtggtagtctcattttctataggnataaacatcagntggttcattgaaagggttgtttgggtgcttgtcggcttcgtcgaagggattggtgcttgtttcgggttctggttcgtcgaaaggatttgctggaacgtcttgcttggcgtaactggtgtccccgtagacttgtttcgaagattcaccaattgttttgacgt

SEQ ID NO: 561 - DNA, 269 bp, Ctenocephalides felis
  misc_feature (59)..(59): n = unknown
  misc_feature (66)..(66): n = unknown
  misc_feature (87)..(87): n = unknown
  misc_feature (117)..(117): n = unknown
agatctactaatgccgcgtttaccactgtcacagcaattccgcaaaccagcaaccacanatataantatgatgctattgttaaatgntcaataaatgcacaaattattccacaaatnccgcatgagaccatcacgaatacaagaattggaagctttcccacagagttaataatagcacctattatgggaaatccaatcgcatatccagcttccaacattaaagaatgcataaatgcctgttcttccattgtgtctttacactcggtcgt

SEQ ID NO: 562 - DNA, 500 bp, Ctenocephalides felis
  misc_feature (72)..(72): n = unknown
  misc_feature (443)..(443): n = unknown
aaaaatccaacggatgtttcgtcatacagacctatcagtttgcttcctataatttccaaaatactggaaaanataatatacaaaaaaattaatcatgatttaccgacagacatctggatgccgtcacatcagttcgggttcaggcataagcactcaacgactcaacagatccataggattgttgaaaatattaaaaaaacatttgaacaaaaggaatattgcagtggcattttcttggacgttcgtcaggcctttgataaggtctggcatcctgggctgttatataaaattaaaaaacactttccagttaaatacttcaagttattaaaatcttatttagaaaacagatctttccagattagagtgaacgctgaactgtcagatttctgtaaaatagggtcaggtgtcccgcagggcagcatcctgggaccattattatatgnattatttaccttagatatccaataccttctaactctattatagctacattgcagacg

SEQ ID NO: 563 - DNA, 270 bp, Ctenocephalides felis
  misc_feature (2)..(2): n = unknown
anatctactaatgccgcgtttaccactgtcacagcaattccgcaaaccagcaaccacgggatataaatatgatgctattgttaaatgttcaataaatgcacaaattattccacaaatcccgcatgagaccatcacgaatacaagaattggaagctttcccacagagttaataatagcacctattatgggaaatccaatcgcatatccagcttccaacattaaagaatgcataaatgcctgttcttccattgtgtctttacactcggtcgt

SEQ ID NO: 564 - DNA, 210 bp, Ctenocephalides felis
  misc_feature (5)..(5): n = unknown
  misc_feature (47)..(47): n = unknown
  misc_feature (106)..(106): n = unknown
  misc_feature (196)..(196): n = unknown
ttttnaagtgcaacccaatcattagggaaccgctaacagaagttatnacagtgacgttctacatcggagaatggttagaattcaaaaaataatcatgcaacacggnctcattattataacattcacataaaaaatatttaaaatatgtaaactagcttgcatgtttattgtaagccagtctataatctattattgnttgcactttactta

SEQ ID NO: 565 - DNA, 425 bp, Ctenocephalides felis
ataagtcatttgaaaataagcatttctgtagtggtgtcttcctggatgttcgacaagcattcgataaggtttggcacccaggacttttatataaaataaaagcatatcttccttcaaggatttttcaagtaaaagtaaatcaagtaacatctgatttccacaaaataatgtcaggagttccacaaggtagtatttttggacctttcttatatgttttatacacaaaggacctcccattacttgaaaatctgacacttgctacattcgctgacgatattgccatactaagtagtaatcacagtgctgatcaagcttcccgacaaacgcaagaacatatcaataaactacaaatgtggcttactaaatggaagatttgcataaatgaaaccaaatcagttcatatcacatttaccctgagagagggt

SEQ ID NO: 566 - DNA, 328 bp, Ctenocephalides felis
  misc_feature (9)..(9): n = unknown
  misc_feature (36)..(36): n = unknown
  misc_feature (43)..(43): n = unknown
  misc_feature (66)..(66): n = unknown
  misc_feature (224)..(224): n = unknown
gaaggatantttatgtaaattaatggttgatattantttggcnttttcaagaaataattatgtggnggcactcttttgcgatattaaaggggcatatgataatgtcgttccaagtataatgttccaagaattaattaaaataggattaccattccgattggtgtcagccttaacatttaatatatatgaaaggaatataatagtgaagaaagataacaaaatanttggtgaaagagtagtgaataaaggactaccacaaggaggtatacttagcccattattgtatgctatatatgtaagagatatagataatatttgggtaagaggt

SEQ ID NO: 567 - DNA, 284 bp, Ctenocephalides felis
tgaaaacgaaataattgttaaaatgtctgacatagaagaacattatgccataaaattgttaacaaacaatttcaatcgagaaccttcaatagttacaaaatgggctatacctgtatcgttcgcaggtttggcttttgttggaacttgtgtggctaatatgctgactaaaaaaccaatgatgtcaggcattcagaaacacatccttctgacatctagttttggtggagttggttatatcgcagataaatatcgtaatgaatattatgcagaaagagatgctatgt

SEQ ID NO: 568 - DNA, 500 bp, Ctenocephalides felis
  misc_feature (101)..(101): n = unknown
  misc_feature (157)..(157): n = unknown
  misc_feature (163)..(163): n = unknown
  misc_feature (174)..(176): n = unknown
  misc_feature (183)..(184): n = unknown
  misc_feature (188)..(188): n = unknown
  misc_feature (192)..(192): n = unknown
  misc_feature (195)..(196): n = unknown
  misc_feature (201)..(202): n = unknown
  misc_feature (204)..(204): n = unknown
  misc_feature (212)..(212): n = unknown
  misc_feature (214)..(214): n = unknown
  misc_feature (218)..(218): n = unknown
  misc_feature (224)..(224): n = unknown
  misc_feature (230)..(230): n = unknown
  misc_feature (240)..(240): n = unknown
  misc_feature (244)..(244): n = unknown
  misc_feature (252)..(252): n = unknown
  misc_feature (254)..(254): n = unknown
  misc_feature (265)..(266): n = unknown
  misc_feature (276)..(276): n = unknown
  misc_feature (279)..(279): n = unknown
  misc_feature (287)..(287): n = unknown
  misc_feature (289)..(290): n = unknown
  misc_feature (292)..(294): n = unknown
  misc_feature (303)..(303): n = unknown
  misc_feature (305)..(305): n = unknown
  misc_feature (308)..(308): n = unknown
  misc_feature (313)..(313): n = unknown
  misc_feature (317)..(319): n = unknown
  misc_feature (321)..(322): n = unknown
  misc_feature (326)..(328): n = unknown
  misc_feature (330)..(331): n = unknown
  misc_feature (334)..(335): n = unknown
  misc_feature (337)..(337): n = unknown
  misc_feature (340)..(340): n = unknown
  misc_feature (345)..(346): n = unknown
  misc_feature (348)..(348): n = unknown
  misc_feature (351)..(354): n = unknown
  misc_feature (356)..(356): n = unknown
  misc_feature (361)..(361): n = unknown
  misc_feature (363)..(364): n = unknown
  misc_feature (367)..(367): n = unknown
  misc_feature (372)..(373): n = unknown
  misc_feature (376)..(377): n = unknown
  misc_feature (379)..(379): n = unknown
  misc_feature (382)..(382): n = unknown
  misc_feature (384)..(384): n = unknown
  misc_feature (387)..(387): n = unknown
  misc_feature (389)..(392): n = unknown
  misc_feature (396)..(396): n = unknown
  misc_feature (398)..(398): n = unknown
  misc_feature (403)..(405): n = unknown
  misc_feature (407)..(408): n = unknown
  misc_feature (412)..(412): n = unknown
  misc_feature (420)..(421): n = unknown
  misc_feature (424)..(424): n = unknown
  misc_feature (426)..(428): n = unknown
  misc_feature (431)..(431): n = unknown
  misc_feature (436)..(436): n = unknown
  misc_feature (439)..(440): n = unknown
  misc_feature (446)..(446): n = unknown
  misc_feature (450)..(452): n = unknown
  misc_feature (458)..(458): n = unknown
  misc_feature (462)..(462): n = unknown
  misc_feature (468)..(468): n = unknown
  misc_feature (470)..(472): n = unknown
  misc_feature (474)..(475): n = unknown
  misc_feature (477)..(477): n = unknown
  misc_feature (482)..(483): n = unknown
  misc_feature (487)..(487): n = unknown
  misc_feature (491)..(491): n = unknown
  misc_feature (498)..(498): n = unknown
  misc_feature (500)..(500): n = unknown
accaatgtataaccgttagactgcaacgcggcgtttacgcgctttgatatttcatctctaagcagctaacacaacgtaattgctttgaaaaaagcatttcnaaattttcaacaaaatatttcaaattaaaaaagtcaatttctctcacttttcaaanttttgnaaagctttttnnnaaattannctangggnccnnaagtnntnacaaattngnccgnaaagcnagaagncctgcacccncaanggcactgncnccggtaaaaannggggggctcncanaataattncnntnnncccccagcntnggncaccnacgnnncnngttnnncnntanntntcnctccnncnacnnnntntcgtncnnacnacgcnntanncnccncntcncnnnncccntncaccnnntnncgcncgaccatnnctntnnnaangcccnatnncccctntagnnngccgtntctnacttgntnnncnncntttcnntgancgtntctcggnan

SEQ ID NO: 569 - DNA, 358 bp, Ctenocephalides felis
acaattgtgtagtgcagtggctaactgtattagatgatatagtcaatttaaaattcaggaactaaacttaaattagtattacgttgctgtcttcacattatgttctatgctcatcagttttaagttaaagttggccaccactcatatatagcaaatagataatgactattgcgaaagaagtctagactataaaaatactaatttatttatttatgtagtatatttttagtattgtgagtgaaagacgtttaaaatacatctaattcaaaatagtcaaaatgattctaaccacattttgtatgttttaagtatgcaagcatgtttgcttgagatttgtttaagaacctaattgtttagt

SEQ ID NO: 570 - DNA, 368 bp, Ctenocephalides felis
  misc_feature (157)..(157): n = unknown
  misc_feature (183)..(183): n = unknown
  misc_feature (190)..(190): n = unknown
  misc_feature (196)..(196): n = unknown
  misc_feature (217)..(217): n = unknown
  misc_feature (222)..(222): n = unknown
  misc_feature (228)..(229): n = unknown
  misc_feature (233)..(234): n = unknown
  misc_feature (244)..(244): n = unknown
  misc_feature (248)..(248): n = unknown
  misc_feature (251)..(251): n = unknown
  misc_feature (256)..(256): n = unknown
  misc_feature (261)..(261): n = unknown
  misc_feature (271)..(271): n = unknown
  misc_feature (284)..(284): n = unknown
  misc_feature (325)..(325): n = unknown
  misc_feature (339)..(339): n = unknown
  misc_feature (353)..(353): n = unknown
  misc_feature (357)..(357): n = unknown
acgtaatagtctacttctactaggtgttcactcgtcaaaatcacgaattgaactggcggattaggaattgccaaatattttatattttactcgtaacaaatattttttaaattgcaataaaaaaaatcttgtaatttaggctgtaaaacttcattgnttaaatatagaatatgtaatatgatnagttgangttggnatatctataaagttttttttngtttnatgttnncaannatcaatcaangttngcnttttnctgangtatttgaanattttgatacaantattaaaatattttgatttttagtttttttttgcatatatngctgatcaaaatantataattttttaanacantatgctggttg

SEQ ID NO: 571 - DNA, 255 bp, Ctenocephalides felis
acaatgttttacatcattaacattaatttgcattcatcacaatgaacaaaactgatctttcgttcaatcaataacgtaatctagaacaattgtaatgaattacttttattattataagaatccaaacatgtattattccttaaccattttctaaagatctatggcatatttaaacatattaatatattttgatactatttattttcattaaaataagcaaaattggcatattaaaacaatttaaatagttttagt

SEQ ID NO: 572 - DNA, 500 bp, Ctenocephalides felis
  misc_feature (459)..(459): n = unknown
accactgtatttcttgaagtcaaaattaatatactcagaaatatcataaaaactgttggcttatttagtaaattaatcaaaacgttgtggaatttatgattgctttgttgtcgtatttgtaaaggtaataaattgaacagttgaatacccaaaccatcaattgaattaaaagtagtattaagcttaaaagtcgatcctctgatagttctattccttgtgacatagtagagactagacatggaagataaattaaaatactggggattattttttataaagagaagtgtaataagtaggaatatgttaggaacggtaagaatattatacttctgaaaaatatttctacaacttgtcatagagttaagagaaaacatgattcttagtgctcttttctgaagcttgaaaacatataatgaaaatatcttctataatatgtatgaaaatcaaatcatattttgntatattcatcatcaaactttctcatattttgcttctttttc

SEQ ID NO: 573 - DNA, 341 bp, Ctenocephalides felis
actgtttaattgtatatgtaacttttactcgttactcttatcacagagtaatcaaattgacaagatgacgcgttcttaattaataaatgatttggacttctattatttattataagttggtaaatccttgaaggcaacacagcaatttgatgatatcggcctccgcctatttttcctcaaatgaataacacaaaaatcctatcgataattaactaacaatagcacggacttataatactaaaacgaattatgatttagttcacattatccttacggataaatgaagtgtttgttacaacttacaataaatgttgtaaagagttgataaagttacaaattgt

SEQ ID NO: 574 - DNA, 359 bp, Ctenocephalides felis
acatatacatatttatgatccttctattagtagattatataattaggtttttgtctttgaactgattatctgcaaataacgtaaattagaaaacgcacaagagaaaatgtttatatgattccgatatttactcactatttatttttcacaaagcatagaattagtttttatatgatgcttgatcaataatggtgtttgaaattttaaaattaatatacgaagctatttaatatcacgcaaagaaactttgatgtttataagacacctatgtttacacatacatacacatatattgtaaatattaatacttctttataaaatccatgcatatttgctttgtcatattcttattattctgt

SEQ ID NO: 575 - DNA, 353 bp, Ctenocephalides felis
acataatatataagttcgttttatattaattgaaatatataaaatattcgaatttaaaattaatgaataattaaaatgttcgtttaaattgatttaagcgtaatggatttagtggatttgtttgattttgatgctctactctgtagtcgcggctggttcggtcttttcggtcttttcgatcttattggtcttatctgtattatcggtcttatccaccaccgattcgagctcaagggctttgagttgaagtggccttttttggatgtaataagataataaatttacatcattacggatttttccactttctgggtagtaagatttcctcttgttgtaggccttgtcgcctgcgt

SEQ ID NO: 576 - DNA, 399 bp, Ctenocephalides felis
  misc_feature (35)..(35): n = unknown
acacttgacccaatactgatgtcgtcaaatattcntattgtaaagtcatatataaatcgtcaaacagtttttgagttgtttcaagtattttgttttgatagtctagttcaaaagattttaaacacatcgcccagcaaaatatattgcgttttcttcgtaaaaatcaaatttcgtacacttgactcaataccacacacaaatcattttatttttctgtcttcgaaaacagatattaataggcaaatgttatgtttcagtaatctctagtattttttttcattgacatgtttatatacagattttaaatatattgtgttttttttacaatcccaacgtctctgttatgtctctcagcactcgacaatttttgaacctatcgacggggtgtcgtagtgccgt

SEQ ID NO: 577 - DNA, 1000 bp, Ctenocephalides felis
  misc_feature (280)..(280): n = unknown
  misc_feature (380)..(380): n = unknown
  misc_feature (780)..(780): n = unknown
  misc_feature (880)..(880): n = unknown
accgtaattaaatattggaatgattttaattgatttcaaatagattattatgaatattgtaactttcattattcatatttagtagatgaaatgtaagtagcttataaattgaacgacggtctttatacatgtttatatgaaaagtaaataaacaaacctcatagaaatttgataaactgaattgcaaagctcaaattatttatttcaagtatataagcgagctttagaattttcgatagaattaaaattaaaaaatctgatgattttcaatattaaaaanaaagaaaattaaaaagaaagtggaattttgagatgaaaaaaacaatttatttctcaaaaaactaatcgattctaagcattgtcaatgcaagcaatatgtntttttaaatcattggaatttagatgctgcgttttcacaaaaactagattttagcactttttgctcttcatctaccaaacgggtggacctgcctatgcaaaaatctaacaaaaacgtctcgaccgtaattaaatattggaatgattttaattgatttcaaatagattattatgaatattgtaactttcattattcatatttagtagatgaaatgtaagtagcttataaattgaacgacggtctttatacatgtttatatgaaaagtaaataaacaaacctcatagaaatttgataaactgaattgcaaagctcaaattatttatttcaagtatataagcgagctttagaattttcgatagaattaaaattaaaaaatctgatgattttcaatattaaaaanaaagaaaattaaaaagaaagtggaattttgagatgaaaaaaacaatttatttctcaaaaaactaatcgattctaagcattgtcaatgcaagcaatatgtntttttaaatcattggaatttagatgctgcgttttcacaaaaactagattttagcactttttgctcttcatctaccaaacgggtggacctgcctatgcaaaaatctaacaaaaacgtctcg

SEQ ID NO: 578 - DNA, 500 bp, Ctenocephalides felis
  misc_feature (41)..(41): n = unknown
  misc_feature (71)..(71): n = unknown
  misc_feature (212)..(212): n = unknown
  misc_feature (248)..(248): n = unknown
  misc_feature (263)..(264): n = unknown
  misc_feature (269)..(269): n = unknown
  misc_feature (356)..(356): n = unknown
  misc_feature (365)..(366): n = unknown
  misc_feature (379)..(379): n = unknown
  misc_feature (385)..(385): n = unknown
  misc_feature (389)..(389): n = unknown
  misc_feature (405)..(405): n = unknown
  misc_feature (414)..(414): n = unknown
  misc_feature (480)..(480): n = unknown
acattgagcattcttgacttttcgcatttaaacagctgtancttttaaatttaattattaccaaaaaatantattaacacttttgttaagcgataaacaacaaatccattaatccgtataggaatttattgagacttttcattgaggagctacatccgtttaactaaaaatttgctcaactagctccgccctaccctacttaactttatatntatccctttggaatatattgacaagacgcatttatntgttattatttatgnnttaanctttataactaaatactatgaaataattccatatacattcaaatcattttatttagtttcagtaattatatttgcatataatataangatgtattnntttacttatttanaaattntaangtaaattttagtattnaataaatantgggaggaaatctaggaactaggatgaattttgcaactcataaatatgataaacatttatgaattntgcttatattctaatttgaa

SEQ ID NO: 579 - DNA, 500 bp, Ctenocephalides felis
acaccgtaaagctttcgcttttcggtccgagatacgagacctcgtttcaaaattgaaatatgaatatttcattgtgtgtgagattgaaaaatctgctttcgctgatctttcattttcttaaaacaacgcaatgaagcgaatgttcaaattcgcacaatttgaataaaatgtgcagagtatatagaatactaacgcaagcgtttactacaatcgactttgaaacactagactttcatctagcgcccaaagaattgattgagctatgcgtttaaagtataatattcaaaaagaacgccgttttcacaacgaacttcgtcattcgctcaggcatctggcgataccgagcagatatacatggcagtgctctcacacaatgcataagagcgctaagcggttgtaaaccgcgtcacgctgcttttgcacactgcgcaatattttgcgactagctccggtcaaacgttaatgaaacgaatgatccatcgttgcgagacgctttaaga

SEQ ID NO: 580 - DNA, 277 bp, Ctenocephalides felis
acgagagcgacatgttcgggaacccgtgcgttatacctgctcgagtcctttggttttgagacgtcccattgcatattcataggatattcataggatatcgcgatattaggagattgtgaggacaagtgggacattccctggcatgtcttgtgctgtctgggaaggctgtcaaatgttatttcttcacagattgaatcaataaccgaaactatgacacaccaaaatactaaccgaaagcctgcaaataattttatcgccaattcagataaatatttgt

SEQ ID NO: 581 - DNA, 500 bp, Ctenocephalides felis
  misc_feature (340)..(340): n = unknown
  misc_feature (493)..(493): n = unknown
acacaaaattagaaaaatttaattaaggatctgcgataaaaaaaaaacaatttttgacacatgaaacaattttctaaatcatttttctatttcatgttcaagagaacagacggacagacgaacagatagataaacaggtggacacttaacacgttaatcgccatgataatatcagaaaaaaatttacatgcactatggtaactttattagttgaaaatgtatcgaaaactccatgtagcaaagaaaaaaagatattttgaaaaattcctgcacattatttttttatgccacatatatatgactgatatatatgtcagacataatttataaactagtcggnttggtatttagccttgaggcaagttacatgaacttcccgatatgtttaaataatcaacttaatcaataaaaaataaattaatttatgagtcattaaaagtattccgagtggatttattatacataattgaaaacgaacgaacactttgactcngagtatt

SEQ ID NO: 582 - DNA, 469 bp, Ctenocephalides felis
acaacggggatttgattccaaccacaacaccaacgcaaacatttttgttctaggcatttttatacaaattgaaatagcacaatttaaaccaaaacgaaacagaacaagtaaaccgcgcaaattatcaaatcactctaccgacgccgacgtcattttgctattctcgggattttagtgtgtcacaaaaaccagatgttgataacaggttgactgccgaccgtagtgttgtgccattagtgtggaaatttataaatatacatatgattcagaatatgagtaacacttggttatatttataacgaagtttattcacagaaaaatatagaattgaatttagaaaataacttttgtatacgaagtgtaagttacggtggttcaaagtagagagagttttgccggtttctcctttccaaacccggcgtcctgggttgccagagcaatcatgtttgttcttccgaagcctcgccgt

SEQ ID NO: 583 - DNA, 500 bp, Ctenocephalides felis
  misc_feature (9)..(9): n = unknown
  misc_feature (27)..(27): n = unknown
  misc_feature (35)..(35): n = unknown
  misc_feature (40)..(40): n = unknown
  misc_feature (43)..(45): n = unknown
  misc_feature (61)..(61): n = unknown
  misc_feature (76)..(76): n = unknown
  misc_feature (79)..(79): n = unknown
  misc_feature (87)..(87): n = unknown
  misc_feature (129)..(129): n = unknown
  misc_feature (139)..(139): n = unknown
  misc_feature (143)..(143): n = unknown
  misc_feature (169)..(169): n = unknown
  misc_feature (173)..(173): n = unknown
  misc_feature (178)..(178): n = unknown
  misc_feature (181)..(181): n = unknown
  misc_feature (185)..(185): n = unknown
  misc_feature (188)..(188): n = unknown
  misc_feature (209)..(209): n = unknown
  misc_feature (212)..(212): n = unknown
  misc_feature (222)..(222): n = unknown
  misc_feature (247)..(247): n = unknown
  misc_feature (250)..(250): n = unknown
  misc_feature (253)..(253): n = unknown
  misc_feature (256)..(256): n = unknown
  misc_feature (259)..(359): n = unknown
  misc_feature (262)..(262): n = unknown
  misc_feature (276)..(277): n = unknown
  misc_feature (286)..(286): n = unknown
  misc_feature (293)..(294): n = unknown
  misc_feature (297)..(298): n = unknown
  misc_feature (302)..(302): n = unknown
  misc_feature (314)..(314): n = unknown
  misc_feature (322)..(322): n = unknown
  misc_feature (335)..(335): n = unknown
  misc_feature (354)..(354): n = unknown
  misc_feature (362)..(362): n = unknown
  misc_feature (392)..(392): n = unknown
  misc_feature (396)..(396): n = unknown
  misc_feature (411)..(411): n = unknown
  misc_feature (418)..(418): n = unknown
  misc_feature (426)..(426): n = unknown
  misc_feature (434)..(435): n = unknown
  misc_feature (438)..(438): n = unknown
  misc_feature (443)..(443): n = unknown
  misc_feature (451)..(451): n = unknown
  misc_feature (453)..(453): n = unknown
  misc_feature (463)..(464): n = unknown
  misc_feature (467)..(467): n = unknown
  misc_feature (470)..(470): n = unknown
  misc_feature (474)..(474): n = unknown
  misc_feature (480)..(480): n = unknown
  misc_feature (491)..(491): n = unknown
  misc_feature (495)..(496): n = unknown
actgactgnatatccattgcgcatttngtataatngaatnttnnnagcaataaactttganggattgaggggtatntcnaatttggncattgattcccattactatgtgatcagtcatttcgtaaattntattttcctnattnttcataaccactatactgtgcgcgtntgtnatgancgnggcnatnataacgaatttgataaaacgnatncctaataaanatttgattttgtacacctaggtcgngancangcnaagacnaataatgcagatgnncatcacagnggggganngannaaangtggatgtagangggtcatntttggcctatagngagtcgtattacaattcantggcngtnagtttaacaacgtcgtgactgggaaaaccntggngatacccaactgaangacttgnagcacatncacctttnnggnaggtngggtaatntncgaagaaggnntgnacngatnggcctnccaacagttgngcannctga

SEQ ID NO: 584 - DNA, 500 bp, Ctenocephalides felis
actgcctttaatagaaaccatagaaagttgagtaatggaaaaatatatggtggtcctatttttcgaatagatgaatgcttctcagtatatacaataaaagtctcttgggcagtagaagcattatttcgacaaagatattgtaaaactgcttgtgttatgaacatatcaatttctccattaaatcctttctctgtatgcaattcaactaacatagaagcaaaaccggacccatccatggagaacataaaatgatatcttgcttgagcataatttttttcttgccaatatgcttgtgccaatttctggaattatgtttatatttaaatatgcaacaaacttttcaaaccttcctctgtcctatatctaattattagcaatccttccataaacctacatactcactttatgcaattcaggatgtccaagtttattatcaccatccttgaccatgttaaggaatttgataaaaatgtctctctctctggcacatagggcccaat

SEQ ID NO: 585 - DNA, 445 bp, Ctenocephalides felis
  misc_feature (40)..(40): n = unknown
  misc_feature (48)..(48): n = unknown
  misc_feature (249)..(249): n = unknown
  misc_feature (309)..(309): n = unknown
acatatttacgcgcaacatagcggcactacgcgcaatatncaagccgncagattaaaactgtgattaaactcataataaaactcgatggcacgatcattttatgaaacattaaatatcagttattaaatgaacacttaaacgggaatttcataatgtagataatatgacaaaatcgattttattttgcttctgtttaaattgaatatgcccggtaattgacaggttttaactgataaacggaatagctnctgatcattaatagccaaaattgtgctaccgtaatattatgattcagcttctaatggatnaataataaattatttcgaatggtttcagtgggcggcgtgtaaataatatagttcatcacttgcaatgttagatttatgagaaaatgcattgctttgctcgttaattaaagatttcatttaaatttatatatgtggg

SEQ ID NO: 586 - DNA, 500 bp, Ctenocephalides felis
  misc_feature (301)..(301): n = unknown
  misc_feature (334)..(334): n = unknown
  misc_feature (356)..(356): n = unknown
  misc_feature (388)..(388): n = unknown
  misc_feature (433)..(433): n = unknown
  misc_feature (447)..(447): n = unknown
  misc_feature (489)..(489): n = unknown
acaagaaaagagggcgatatagctcaatgtgttaaacgcgccatcgagggtctccgaccaatattcctcgaaggagacaaagctcgaaatataccatcattggaacccctcgaggtgggagatttgctggtgggcgactacggtcgtagcaacggaggtctacggatttctgctacggaaatcatggctaagggcgcctccaatttccgtattgataaaataagcggagatcttgataaactagaattttactttgaagtattactacctcgtcttgagactacaggaaaatatgctgtanatggaaatgtattattattacctattaagggtngtggaccatttactggaaattncactgatagtgtaggaaaagcttgtaatgcanggagaaaattggtcgaaaagatggccaaaacatattaaattcacngatttaaatatcangatcaaagttggaaaaggtcgcttgcttttgaagaattatcngtggtgataaa

SEQ ID NO: 587 - DNA, 193 bp, Ctenocephalides felis
  misc_feature (15)..(15): n = unknown
  misc_feature (39)..(39): n = unknown
  misc_feature (46)..(46): n = unknown
  misc_feature (57)..(57): n = unknown
  misc_feature (60)..(60): n = unknown
  misc_feature (125)..(125): n = unknown
  misc_feature (157)..(157): n = unknown
actgaagtttgttgngcgtaaagatcactgatgtggganaagaagncgacaaaacanagnggtaaactttcgacaaggaatacattaccaacaaaattataaaagtcatgaataaattaatatgnaaatattatgataaggattatatacttttganttctttttgtaaataaagattacggatttaaattct

SEQ ID NO: 588 - DNA, 399 bp, Ctenocephalides felis
accattttatatgagagacggtatcctagctttgccatatcattggtctattttaggacagaactggtccctatatatggcaatatccaccaacatttttatgcaatatctaacaaacaatatactgtatttttaccatttatttaccaacgagcaaagttctctcgaatctgatctcctcgactagcgacaactaagttattagtcttaactgaataataacacgttgcctgatatgataatattataaatatatactagctcccagttaagcgcttatatctgtcgctttacaacactttacatattatgcaaatcaggttcttctttctattgaagttccagttgcctgtaataagtgcatccctataatttcgattgtctcaaagatctcactgt

SEQ ID NO: 589 - DNA, 238 bp, Ctenocephalides felis
  misc_feature (40)..(40): n = unknown
aaacaattccgagattaacggggctcgacccggcgaaatnggtgcttgcgtatcgagcgcaataaaaacattatataacacaaacaatgcagattattcggttaacgaaattataagtgaaaaaaagtcattaggaaacacaaaaattaaacataaaatcaaacctagcattagcaaaaatgccgaaaaaaatattaaaaaaaatactgacattattccagaaatgttaaaatctggt

SEQ ID NO: 590 - DNA, 500 bp, Ctenocephalides felis
  misc_feature (12)..(12): n = unknown
  misc_feature (19)..(19): n = unknown
  misc_feature (62)..(62): n = unknown
  misc_feature (71)..(71): n = unknown
  misc_feature (104)..(104): n = unknown
  misc_feature (107)..(107): n = unknown
  misc_feature (126)..(126): n = unknown
  misc_feature (166)..(166): n = unknown
  misc_feature (171)..(171): n = unknown
  misc_feature (180)..(180): n = unknown
  misc_feature (192)..(192): n = unknown
  misc_feature (194)..(194): n = unknown
  misc_feature (200)..(200): n = unknown
  misc_feature (218)..(218): n = unknown
  misc_feature (231)..(231): n = unknown
  misc_feature (249)..(249): n = unknown
  misc_feature (274)..(274): n = unknown
  misc_feature (279)..(279): n = unknown
  misc_feature (287)..(287): n = unknown
  misc_feature (289)..(289): n = unknown
  misc_feature (291)..(291): n = unknown
  misc_feature (298)..(298): n = unknown
  misc_feature (337)..(337): n = unknown
  misc_feature (358)..(359): n = unknown
  misc_feature (370)..(370): n = unknown
  misc_feature (382)..(383): n = unknown
  misc_feature (397)..(397): n = unknown
  misc_feature (407)..(407): n = unknown
  misc_feature (415)..(415): n = unknown
  misc_feature (422)..(427): n = unknown
  misc_feature (429)..(429): n = unknown
  misc_feature (438)..(438): n = unknown
  misc_feature (441)..(441): n = unknown
  misc_feature (445)..(456): n = unknown
  misc_feature (458)..(458): n = unknown
  misc_feature (461)..(461): n = unknown
  misc_feature (463)..(463): n = unknown
  misc_feature (465)..(465): n = unknown
  misc_feature (475)..(475): n = unknown
  misc_feature (490)..(490): n = unknown
  misc_feature (492)..(492): n = unknown
actcggtccganacgctanatgcgaagagcgaacgaaatttcttactatgagcggttgcaangctagttgnatatttattataaaactataataaaattataantcnatcctttaaaaatattttngatacgtaaatccgtatatattacataaatatatggtatnttatnaaagacganatgttttacgtnancatttntgggtaacaaactattanttttaatactatnttaccatttatatatttngctatcttagtatttattgcgtttngatanttcatatnantntaatttncaaatacaatgtgaaaaataagctattacattcttacangcaattgaacgtagcttatannatcatatcatnatttatgtaacnnactattatgttgtnactaatttancaccatanataatannnnnngnataatgttnaanacantcgaattgtcnangcnanantctagattgnatataagtatgattntntgtgatat

SEQ ID NO: 591 - DNA, 427 bp, Ctenocephalides felis
  misc_feature (33)..(33): n = unknown
  misc_feature (43)..(43): n = unknown
  misc_feature (47)..(48): n = unknown
  misc_feature (66)..(66): n = unknown
  misc_feature (70)..(70): n = unknown
  misc_feature (76)..(76): n = unknown
  misc_feature (78)..(78): n = unknown
  misc_feature (84)..(84): n = unknown
  misc_feature (102)..(102): n = unknown
  misc_feature (114)..(114): n = unknown
  misc_feature (134)..(135): n = unknown
  misc_feature (162)..(163): n = unknown
  misc_feature (180)..(180): n = unknown
  misc_feature (203)..(203): n = unknown
  misc_feature (213)..(213): n = unknown
  misc_feature (225)..(225): n = unknown
  misc_feature (237)..(237): n = unknown
  misc_feature (240)..(240): n = unknown
  misc_feature (250)..(250): n = unknown
  misc_feature (277)..(277): n = unknown
  misc_feature (298)..(298): n = unknown
  misc_feature (326)..(326): n = unknown
  misc_feature (342)..(342): n = unknown
  misc_feature (355)..(355): n = unknown
  misc_feature (366)..(366): n = unknown
  misc_feature (387)..(387): n = unknown
  misc_feature (391)..(391): n = unknown
  misc_feature (413)..(413): n = unknown
  misc_feature (426)..(426): n = unknown
acatatcggcggtttcttgcattctatcataanttgcagccanttcnnactaattagctaccaatnaagnttaatngnaatatnctcgtccatcgaacgctntttaataatctngaagacaacgcgtgcacggnncttattaaatcgtctataacgataatnnatttttatatatacatncatatatgtatactgtatatatncatatacagnaaaaccccgatnagacgatctttnaanaggctggacnaaaaacgcatcttacggcagaaaatantattaaaattacattaattgntaaaacaatgaaaatattttcatttgcnagttttagtttatcanccattcactaaantagctgtaagnggaattctgccttaaggcacnatgncttaattgccttaaggcaaatngctggaacttttng

SEQ ID NO: 592 - DNA, 307 bp, Ctenocephalides felis
  misc_feature (2)..(2): n = unknown
  misc_feature (15)..(15): n = unknown
  misc_feature (19)..(19): n = unknown
  misc_feature (22)..(23): n = unknown
  misc_feature (25)..(25): n = unknown
  misc_feature (29)..(30): n = unknown
  misc_feature (34)..(34): n = unknown
  misc_feature (39)..(39): n = unknown
  misc_feature (42)..(43): n = unknown
  misc_feature (45)..(45): n = unknown
  misc_feature (61)..(61): n = unknown
  misc_feature (63)..(63): n = unknown
  misc_feature (65)..(65): n = unknown
  misc_feature (74)..(74): n = unknown
  misc_feature (106)..(106): n = unknown
  misc_feature (117)..(117): n = unknown
  misc_feature (128)..(129): n = unknown
  misc_feature (138)..(138): n = unknown
  misc_feature (142)..(142): n = unknown
  misc_feature (147)..(147): n = unknown
  misc_feature (154)..(154): n = unknown
  misc_feature (156)..(157): n = unknown
  misc_feature (159)..(159): n = unknown
  misc_feature (172)..(172): n = unknown
  misc_feature (175)..(175): n = unknown
  misc_feature (178)..(178): n = unknown
  misc_feature (180)..(182): n = unknown
  misc_feature (187)..(187): n = unknown
  misc_feature (191)..(191): n = unknown
  misc_feature (196)..(196): n = unknown
  misc_feature (200)..(201): n = unknown
  misc_feature (214)..(214): n = unknown
  misc_feature (233)..(233): n = unknown
  misc_feature (298)..(298): n = unknown
antcggtattgccanctgnccnngnggtnngatngacgntgnntnctatgtgcgccggcantncncgattcatngctacagaaacggatcgttaaattttttgcanactattgaagngcatgttttgnntctgatatntacnatcanattacantnncnggatgcggtatanttncangnnncgatncgangaaanctanntgtcgaatggcgntatgaataaggcataacancattctaggtattagataattaccaataacttatccgctagactaatatctaatctaaatatatncgttttcgt

SEQ ID NO: 593 - DNA, 500 bp, Ctenocephalides felis
  misc_feature (4)..(4): n = unknown
  misc_feature (7)..(7): n = unknown
  misc_feature (25)..(25): n = unknown
  misc_feature (41)..(41): n = unknown
  misc_feature (44)..(44): n = unknown
  misc_feature (67)..(67): n = unknown
  misc_feature (193)..(193): n = unknown
  misc_feature (264)..(266): n = unknown
  misc_feature (268)..(268): n = unknown
  misc_feature (274)..(275): n = unknown
  misc_feature (281)..(281): n = unknown
  misc_feature (285)..(285): n = unknown
  misc_feature (294)..(294): n = unknown
  misc_feature (298)..(299): n = unknown
  misc_feature (302)..(305): n = unknown
  misc_feature (308)..(308): n = unknown
  misc_feature (310)..(310): n = unknown
  misc_feature (317)..(319): n = unknown
  misc_feature (321)..(321): n = unknown
  misc_feature (325)..(326): n = unknown
  misc_feature (329)..(329): n = unknown
  misc_feature (332)..(332): n = unknown
  misc_feature (335)..(335): n = unknown
  misc_feature (338)..(338): n = unknown
  misc_feature (340)..(340): n = unknown
  misc_feature (342)..(347): n = unknown
  misc_feature (349)..(350): n = unknown
  misc_feature (357)..(357): n = unknown
  misc_feature (359)..(359): n = unknown
  misc_feature (363)..(364): n = unknown
  misc_feature (367)..(367): n = unknown
  misc_feature (369)..(370): n = unknown
  misc_feature (376)..(379): n = unknown
  misc_feature (383)..(383): n = unknown
  misc_feature (388)..(391): n = unknown
  misc_feature (393)..(395): n = unknown
  misc_feature (397)..(398): n = unknown
  misc_feature (400)..(400): n = unknown
  misc_feature (404)..(404): n = unknown
  misc_feature (405)..(407): n = unknown
  misc_feature (409)..(409): n = unknown
  misc_feature (413)..(413): n = unknown
  misc_feature (416)..(419): n = unknown
  misc_feature (421)..(421): n = unknown
  misc_feature (423)..(425): n = unknown
  misc_feature (427)..(427): n = unknown
  misc_feature (429)..(429): n = unknown
  misc_feature (433)..(433): n = unknown
  misc_feature (437)..(439): n = unknown
  misc_feature (441)..(442): n = unknown
  misc_feature (444)..(444): n = unknown
  misc_feature (449)..(451): n = unknown
  misc_feature (455)..(455): n = unknown
  misc_feature (465)..(465): n = unknown
  misc_feature (468)..(469): n = unknown
  misc_feature (471)..(471): n = unknown
  misc_feature (473)..(473): n = unknown
  misc_feature (475)..(475): n = unknown
  misc_feature (478)..(478): n = unknown
  misc_feature (480)..(480): n = unknown
  misc_feature (484)..(484): n = unknown
  misc_feature (489)..(489): n = unknown
  misc_feature (491)..(491): n = unknown
  misc_feature (494)..(494): n = unknown
  misc_feature (497)..(499): n = unknown
ccanagnatattatattggtaattncctatggtacaaacanaanttaactaggtataagataaattntcatttcaagacatctgttactttaagttgattagcaagaatctcaaattgttagctgttaatttaaaaaaatataaaagcggcctttactaaaaatgtaaatgtgaaaatattttcaaaaatatnttttgaatacattatgcttaaaatcggattaggattttcagaaaaatattaactgacaactggaaacttannntntttatnntttcantatntatagcagnatanntannnnatntncattctnnncnaatnntgnttnttntcntntnnnnnntnnatttttntnccannctntnngtcccnnnnattntgccnnnntnnntnntntttntnncncacnttnnnntncnnntntnttcntttnnncnnanttctnnncatnttcctttccnctnncntntnctncntacnaactntnttnttnnna

SEQ ID NO: 594 - DNA, 500 bp, Ctenocephalides felis
  misc_feature (2)..(5): n = unknown
  misc_feature (7)..(8): n = unknown
  misc_feature (10)..(11): n = unknown
  misc_feature (13)..(15): n = unknown
  misc_feature (23)..(23): n = unknown
  misc_feature (27)..(27): n = unknown
  misc_feature (37)..(37): n = unknown
  misc_feature (40)..(40): n = unknown
  misc_feature (58)..(58): n = unknown
  misc_feature (484)..(484): n = unknown
  misc_feature (490)..(490): n = unknown
gnnnngnntnntnnntttggaancacngaagctcttngtnagctccaattcggtttgnggaaaaccctccaggtacggaacccatgggaatgtaaacaaaatttatacttattgttaaaatctctctaaaatatctgataatttgatgtgcatatgtctaatgatcatttttgaccgccaaatggcacatttttttactttttcctccatatctccaaagtcgttggacctttccaaaattttgaacagttcttcatttagtcaatacaaataaaatgttttttaaattattcaaatcggacgctccgttctcttaaaaactgagttaccgttttcggcactttttgccccgtatcttcggaacggctagacctacctttgccaaaaactaatcagcacgtcttcttatcaatatgaatcgaatgttttttaaattattcaaatcggttgattcgtgttcccgaaatcgtcgacgaaaatttgnatccgnacatacatac

SEQ ID NO: 595 - DNA, 204 bp, Ctenocephalides felis
accatgtaaatcgcataattagaccaaatcacgtatccaacaaatctttcaaaataactaaaaatttcgaatcggataatagggttcagataatatcgcatcgttaaatctgcgcccgtaaatctaccaacggtttgatatattcaagcgatcgtgtgggcggcatgtctggtgggatatttactttcacgtctcgcgacgggt

SEQ ID NO: 596 - DNA, 500 bp, Ctenocephalides felis
  misc_feature (64)..(64): n = unknown
actttgtttttcttttaattgatgcttgctcatagaataatgtaaattccgggcaatctgtagnggaaaccaggaaatataatccagctaaaacttgacctttggtatcacgtgccagtaatgaacggaagttgtatactaaattacgccttactgtcacatccactgcagtataataaggtttatgcacatatactagagataccactagatttgtagttgttcctccttctttaatagttctgtgttgtcgttcatgccattcaacataatgagaagattgagtgctataagcatagcaatattcgcgtttgcttccacctggcccttcatcacattgtgtaaaccaacccgtatgtggatatttttcatcagccattactgtcactactcttgcgacgtgatatcctggatcacaaaggactacaccttttcttccatttatgcaaatacgaatagcaccataacgtgttctttttctaagcgccgctggagccctg

SEQ ID NO: 597 - DNA, 428 bp, Ctenocephalides felis
actgacttcttgtatttcaccaccgtatacttcttcctgcaaagctctaaaggtctcactcttggcgggatcgtaaacaacagtcggtttatatggtaggcttgttgtatgacgaatcgcttcggcgacgttggcatcggaatagaggccaattggagaattgaattgtttatgcacaaccttgtttgctatgctatcaccagccactctgtgtaatactgaatcggcaaccttttgcttcattaaaacttcatgatttaatgttgactgaacgggagccctcatggccggattcgggtggtggcgcagatagcaatcattagcatttgagtcgcgcttcacctttgcacctggtagcaccaacggggtcgttctgtatggccaaagtgttgcagaatcatccattttatttccgtgatccgtggtgt

SEQ ID NO: 598 - DNA, 500 bp, Ctenocephalides felis
  misc_feature (460)..(460): n = unknown
  misc_feature (491)..(491): n = unknown
cgtttttcacgaaattatgcaacttgtattaaatcgcttgttaatatcactgtgcatgtccgccaaaaaaatatcataactcatcaagttgtgaaactaaagattttccattattacatattacatactatacatcataatactgaacgaagattattaatcgaacgctttatggagtctgatatatttctgtaatctagacgtataagaatctttccgcttatcttgacttatttattgtttgttaatgattatacgcagcacaattgatattttatcacactttccaataacaaatttttatggtttatgtgattttgtataaaatgctgctaattataaaattattcgactgttattacgtgttttgttggactaaattctaagaaaattattaatatttatttagatatatttgtttcgaatttttatttctaatataatgttgcattctatttgntacatttatttaaataaataatctgctttgnaaaaaaaaa

SEQ ID NO: 599 - DNA, 194 bp, Ctenocephalides felis
  misc_feature (19)..(19): n = unknown
  misc_feature (35)..(35): n = unknown
  misc_feature (37)..(37): n = unknown
  misc_feature (46)..(46): n = unknown
  misc_feature (50)..(50): n = unknown
  misc_feature (53)..(53): n = unknown
  misc_feature (56)..(56): n = unknown
  misc_feature (74)..(75): n = unknown
cctgttgtttagacatcangtaaacactaaatttntnacaaccgantttnagncantaatcattaatgtgcacnnaaaactaatatttagatgggaaggattggattttatcttaaaaactaaagaaatgtgtcaaaacgtgcgcgttcctcctcggcgaacacgctagccgaacacagtctcgtcggaactgg

SEQ ID NO: 600 - DNA, 383 bp, Ctenocephalides felis
actcaaaaaataaataataataaaatctgtaataagcttttaactgtatctcattcggaataatacagaaaaagaaatgttctttgctgattattccacttttttcacaattgtagattatcatattttatctataatttatataatttttttaatacatttagttttatatagtttacattatattcctttccataatttttaatattccatgtaatatatgtaggaatattttgtacaaggtgttaatattcaaagttgcataaggctttttgagctttaaaagtaaaagcttcaaaaagtttggaacttttcgtattttgatgtgaaaatcctaaatatctttttttttggtttattgttcatagcaaattatacacagt

SEQ ID NO: 601 - DNA, 500 bp, Ctenocephalides felis
actatactatctaatacatattaatacaacagaactgatgcttagcattacattttttttcataatagatctaaaatgcacttcataaaacaacaacaacattaacgttaattttaacgcgttaaaaaaatcacttttaaatatcagaagttatagctaaaataatagcatttattattattaaaatattaactaaattcgtcccaaaatattaaacaaacacaaaaaatcacaatgtagtaaacaatccaattagattagaatcaaattagtatgaaaccaattcgagtaaaatccatacatagatgttatatagagccattaagagtagaacataataattgtagttaaaatgcatagattgcctcatcaaaaatcaacattaaatgttgtatttccgatgatttgaaatcaattgcaccacaaattatctcaacaacaattcacttatacttatatttatattgacatatattcaggtactacatcttatcatttac

SEQ ID NO: 602 - DNA, 500 bp, Ctenocephalides felis
cataataaatgttacatacattacaataaaatattatacatgtattttgtaaaactcatctttttcatccaatttcttagcagtgcaattaactctgtaattttgacgtatatactcgccatggattcgattcacaagttacaaaactgtacccactttggagcccctaaatttaccacccatcaacatatcgagagaatcgaatggaccttatctaaaagtaacccttaggaatacaacggtttatggagcttccaacttcattgtcacggatttaaaatccgatctcaatactggatatttccaatttaatttgactcttccaaaactggacgttgaaggtgatttcaaaatcaaattaaacctgttgctcataaactatagcggtgcaggtcgaatttacatcaacatgactgattaccacgccaggatgcaaatacatggctacaagaaagttgtcgacggaatcgaatccttcaagtcaaaccaatcgacatgaa

SEQ ID NO: 603 - DNA, 220 bp, Ctenocephalides felis
acgcccaattaaaatgacgagtaaatcaatatcttgtcctattataattgcagtttttccagacattgattcttgaattacactttcaacaataaggacatccgcatcatctctggcttgtttagtagttatatttgcagcctttaaattttccattagcatgttaatgagcctaattttattattttgattcgataaaaataattcttgggaaactggt

SEQ ID NO: 604 - DNA, 465 bp, Ctenocephalides felis
acgtaacctgggaggcacacagaagcatctatttcgcgggcaagaacgtaacggctgtttcgttgcacactaatacaccgcggttacatttttgctacgtatctaaattgaataaaaaagcgtgtaggtgtcttttatgttacatacttatttgattaaatttcctgcaaatatagaatattaataataatttcggatcattagtaattttattaaatattatcatttacaatatacaaaatttacatattacatagttaacattagaaaactaaaatttgatagtccataaaatgttagcctataaatataattatttatttattcataatatgtattatgtttaactctcttggcaacttcagttaaatcagacttggcaaagttaagttttgcgttaaatatgttcaactcacttgcatctgttaatgtatctaaaatagaaccaaacatcttagaacattg

SEQ ID NO: 605 - DNA, 231 bp, Ctenocephalides felis
accaccccccaaaacaccattaatctcacggaacgtttctctagcggatttgcctttaacgaaggaaaactttaaaatagcgcgaatttcggcgtaagtgaactccatgtttacacgtctataactgttaaacgcaatatccaaactaatcatgcatagcatcgttttgtaggttatgtcaagacctttcaaattatgtatagtattgccagatacgagctctgtagcgct

SEQ ID NO: 606 - DNA, 186 bp, Ctenocephalides felis
acgtttggtaatgtcacagacgctctctcgcgggcattgtatatggtgtgattcattgccatagttccgcgcgtcgaaatattcaaaatgcattgcttccgttttaacgacggcattcgagtttctctctttcctgcacaagcgatatgctatttgcatacgggcacatataaatccgcgttcgcg

SEQ ID NO: 607 - DNA, 500 bp, Ctenocephalides felis
  misc_feature (4)..(4): n = unknown
  misc_feature (6)..(6): n = unknown
actncntactatatgtatactttttaaatgactgtaactcgaaaactatttgagatatcgatttgaaattttaatatgttattttcaaaggtgtaatttaccgaaatataaaaaaaacaaaaatcgattttttcaaaatttcacactagttgtgccccttaatccatcttctattgctaaagtgtaggacgtctactattctacacaaatcgcacaaataaaaaattccgacagaaataaaatcccatttcttcaacattttaacttggcaccatcaccgtccctctaaatttcatatgatatattgcaaattattccggcaaacgcgttgcgcaacaatgggcccttgctcaccgtaaacataaacagttcttatcattgacgtgccttcgttctgtattgtatacatatgtatgtatagatacaccaaaaataggtatacatgatgaaatattctgcaacgaatatatcgggaaatgcatgtattatgcattaatcaa

SEQ ID NO: 608 - DNA, 269 bp, Ctenocephalides felis
  misc_feature (9)..(9): n = unknown
acgaatgtngcacaatcgatgtgatatataacaacgacccaagcgacgtttttcaaaacccgaatcaatttcgcacaattccacaacgaataaaataaacgtgactaacaaacgatatagtggaaagatagtgccagcaaattcgaaggttctgattctgattctcttctgcaattagtttttaaaatcaaaacattttattatattttatgaagttcaattaattgaaggttttattgaaaatttactgaatttatttccctcagcgt

SEQ ID NO: 609 - DNA, 500 bp, Ctenocephalides felis
acttattaacaaaattcaatcaataaaacttattggtattttaacttacttttaagtatcttcagtatatttttcagacagcctcagaatgcttcagacatctttggaatatttactaaatgctcgatatttaatgagacatgccgctttttcatttgatggccaccaatcaaaatcacttttacagtcttaaaatgacagtgatgatgtcagatgaaagcatttgaagaaatataaaaacattgtaaactgtgaaagcagacaaaaaaataacccaaacaactaggccgattgttatacaaatctaatcaacataccttaaagcaatatgacactcaaacctagttattgtgttaatgaatgagtttcctcagattattaacttcaaccactgaacactagatttgtcagggcctccgactgatttcaattgcaaaattatttccaaagcagcttcattttgctttccaatacgaataaaacattggctgagcctgtaa

SEQ ID NO: 610 - DNA, 500 bp, Ctenocephalides felis
  misc_feature (265)..(265): n = unknown
  misc_feature (301)..(301): n = unknown
  misc_feature (314)..(314): n = unknown
  misc_feature (371)..(371): n = unknown
  misc_feature (448)..(448): n = unknown
  misc_feature (497)..(497): n = unknown
acgttatctactcaacctgaaactttgcctttatcgcaactgggaccagtaattagccctgttgcaaccacattgggtcctgatgcagaattgcatacttttcgagaagcacttgccatgagttctttgagtggacgacgtgctcgacatggtcctgagttatatgcctttgtaactggtgaaatagcaagacactgtaaaagaccagccagtcctggtgatgtcaatatggagtctcccacacatcatagtaagcgggtgcggnttatgtaaactggtaagttaactttaacactaaagnaatttatttatgntaatttacatttactattggtcatggactgaagaatattctaagattgccagtttgnaatccaagttttacctggatattatattttactaaattcgaggaatgaactatgaatgatttcataggtggattaanggaagtaattctttaattttatgaccatacattggaatggaccaaaagncct

SEQ ID NO: 611 - DNA, 140 bp, Ctenocephalides felis
acaacatgccacgggttctattcaataaacacattttacacatgatttgccacttacgtttattatctaagcccaaatcatacccctagaccatcgagccacgggttctatccactgcgtgtttgtgttgcatccaatgt

SEQ ID NO: 612 - DNA, 500 bp, Ctenocephalides felis
actcgtgatatcgtgctaaaaaaatatacaaaagtgttgccatatgtggaacttgaattcggtcgcggcattcatcgtagacacgaacagaatgaggtgtgaatctaaactacattacacccatagatcagggcttcttaaactatgggttgcgaccccaaatggggtcatgtaaaaaaattttggggtcgcaaaagattttaatgccattttattcattttattacatcacgccttgattttttatcaacaaattcttaaacatatatattttcatattatatgtatatgtatattgttaccaaataaataaatcatttaaatttttttttatttatttaaaatcattaaaataaattaaaacatgtttttatatgtgtagggtcgtcaacaaactcgcaatcataaatgtgatcgtgaaggacagaagtttaagaaccctgccatagataaataagcacaaatgtttccttatctatgcataaatgataaaatcattg

SEQ ID NO: 613 - DNA, 146 bp, Ctenocephalides felis
ggtcaattgaatctgagctccagtgcttagcaaagatcagtgttacgtataaggtaattttacataatggcatctttgaagttaaatatcgtaaccaggagcttaagctcatctgcagtcgcgtctcaaatggttaaaccacccgt

SEQ ID NO: 614 - DNA, 162 bp, Ctenocephalides felis
cttaaaaattgatgaatttattctatattttatgatttgtatattttattaatgtttcaaagtattatacgacatcttatgcaatcttgtataaaatcattaatatcatctagttgtatattatttgattgttgactaggttgtaaaatgttttggttcggt

SEQ ID NO: 615 - DNA, 274 bp, Ctenocephalides felis
acataaactacgagcctacaagtcttgtatttgcgaacgaccttttcgaacaattaattatttatttttataattaataagatagattttatgaataaaataccatggtgtttgtttcatttaaaattgcattgtgaacatttaggctttaataatgattacgcttgaattctgtattgggaaatttttgtgactcccatattgaataatttagaaatttttgataagttcacaacaatttttgataagttttattggaatgataatttatggt

SEQ ID NO: 616 - DNA, 266 bp, Ctenocephalides felis
acatcttcgatggtaaatcattattagcattttggaaattttaaacacattatgcagaaaatgtatagttctaagcatttttttaagtttaattgtttaagtctaagttgaaagattagatttagacaactccaatcatttgtaaaaaaacactgcttgttttgaaaaacaaaatttatctaaaaattgacattataaaagattcctaaaaattaaaggtatattgcccataaaacaatcggacgttatttccatatcataaaagt

SEQ ID NO: 617 - DNA, 173 bp, Ctenocephalides felis
acgcggaaccgagaacatcgactcattttatcttttgttaaaattatcacaaagccctctcaagagtagacatacgtgcgaacatttattaacacctacacaggtggaaatgtaacagaggcattgtaattttggaactgtttattatttttaactaaatacgctaaattggt

SEQ ID NO: 618 - DNA, 500 bp, Ctenocephalides felis
actatttgtcgttgctgacatttttcctgtgacaagaatcttttaaattgaatgatcgacaatagcaagttaattaaatgcgtgtgtgctttcgacgtttagttaaatagtttacggcctcattctcgatattaattgaaccaaatcagttccagagaaaccacggtggagcagttcaaatattcattgaagtttggaaattaaattcaaccaattcaggtgtagatacgtagatagcactggaaacaccaaaccgcaattcagcagaagttttatcattattttgttattttttataaattttaaaaactttttgaaatgactcagatctatagacgatatgaaatcttgtaatttatatttaaaaattacccggaccccgggttaaatagaaaagccttggtcaaatcttgaccaataatatgaggaatggtccttgatactctatgcattaagttactaaaattccttcgtacttctcatgaccccttattatcact

SEQ ID NO: 619 - DNA, 500 bp, Ctenocephalides felis
  misc_feature (3)..(3): n = unknown
  misc_feature (5)..(5): n = unknown
  misc_feature (16)..(17): n = unknown
  misc_feature (19)..(19): n = unknown
  misc_feature (21)..(21): n = unknown
  misc_feature (23)..(23): n = unknown
  misc_feature (29)..(29): n = unknown
  misc_feature (41)..(41): n = unknown
  misc_feature (43)..(43): n = unknown
  misc_feature (46)..(46): n = unknown
  misc_feature (91)..(91): n = unknown
  misc_feature (120)..(120): n = unknown
  misc_feature (130)..(131): n = unknown
gtntngaagcccttanntnangnttcttngtatttcccgangnccntccaggtacttgcactaaatgtagatcgtaaagttttttatttgnaaacaggtatgtccataaatattgttcgnatactgcatnnagaatattattaattattaaaatcacaaaatatattacagaaaattataaaacttttataaaaatacatatgactggtttaaattagtatgtgattcatcacacacttgattgtaaaatgttgataaaaaaatatgataagagattcaatttaaaatgtaatagtaatctgtaacagttacaacaatatttatatacagtataacaataacaattaaaattgatactcgtatctgcacaaaaagtttcaattgttgaagaaataatcagcatccaatctatgattaatttttggttattttccaatatgtatggacggaaaaataatccttgaaatatcttttggcattcagttcatagctcttcaact

SEQ ID NO: 620 - DNA, 299 bp, Ctenocephalides felis
  misc_feature (33)..(33): n = unknown
  misc_feature (64)..(64): n = unknown
acatctatatataagttcttatctatattaaantaacgaagagaaaagtgaaagaaatattttntcctttctttcttcttttattccactaacgtggaccgtgtcgtatctgtaattatttctaactttacgctcaatcttataattaaggtctgataatttgccaactattttataaggcccgtgcaatggatgttgtggttagtctgattggccttatctacgaacttcggtgttccctaacacccactggcctactataaaatttggcatttttgtggagctctcacgatattttg

SEQ ID NO: 621 - DNA, 491 bp, Ctenocephalides felis
gaaatgtcattgcaaatcttgatgataaaaaggcaggtagtaacgataacatttttgggtttttattttattttgagttacaactacctttatacctgatttgtagagcagaaaaaatgagcaaaaagttcaatgtattattgatcacataaagcaataatacaaatttttccaattaaatgcaacgcattagtaaattcattgaaatgcaattcctaatgcattgcatgtaaatagacaactcactgctacaaacagtgcattaaattctgttttaggcattagtttttgaaatccattttcattttagatcatttttgctatgtgcagtattcggtccttaggatctaaggtaaaaatttaatatagatataaagtcactgtaagaatgtcatttctgaacttttactagaccatgtagaatataacgagttcatgcttttgaagatgtgaaatcttaattatgtttaaattattttcttctttttctc

SEQ ID NO: 622 - DNA, 121 bp, Ctenocephalides felis
acatatacaagcaatatattaaaagtagtctatttaacaaactttaaaatattataatattgtaaaactaaaaacatatataagaagaattactaaagcaaaattgtaattagtaactagt

SEQ ID NO: 623 - DNA, 500 bp, Ctenocephalides felis
  misc_feature (437)..(437): n = unknown
  misc_feature (466)..(466): n = unknown
acgctatataaatgatagttttcggcatacttacaaatcactcataaattcttatgaagtctggacaagaaaattataaaattgaataaaagctctatatgcaaacaaatggaaagatgaataacgaaacacttagcgacaatgccagttggctcccagactttgatgaattagtaattatgaataaggcagttaggggcttgctgtaacatttttttttaattcatatatcttcagatccagtgattatatttctacaaaatagaagtggatagtcgctgcaactatttctctaccaaatcaagtaaagataatttcacaacttttgttaattatttcacaataaatcagtttctagaaaaagttcagagttacatcttacctcgtgtttggggcatgttgtaatagctaccggagcaagtagtagatcggcaatnatgctctgataaatcattctctattattntataaaattaacttgttctaagtaattctgttat

SEQ ID NO: 624 - DNA, 409 bp, Ctenocephalides felis
acaaattttctaaaaatattagttatgttttataaatagtttaaaaattacatattattgaacaagaaacaaactgtagtaaattaaaaacaagatccaaatttccaaagcaatttgttaatcaataactgaaaaacgactcgtcgattattgacaaaatttaatcagcaagattctcaaatggaaaacgtttgtaatggtttttgaatttttaaaatcaattcactaattaaaaatttgagacttttttgaaaattctaaaggcaaaactaagcagcacgagtgcttatcgaatttacgaattttgacgatttttcaaatgggattgtgcatttttgagaaaaggccactaaagatgaaattttgctcacgtaaaaaagcgccgctcatttttgcaatctttgatagt

SEQ ID NO: 625 - DNA, 600 bp, Ctenocephalides felis
  misc_feature (1)..(1): n = unknown
  misc_feature (6)..(6): n = unknown
  misc_feature (12)..(12): n = unknown
  misc_feature (22)..(22): n = unknown
  misc_feature (26)..(26): n = unknown
  misc_feature (40)..(40): n = unknown
  misc_feature (42)..(42): n = unknown
  misc_feature (46)..(46): n = unknown
  misc_feature (50)..(50): n = unknown
  misc_feature (54)..(54): n = unknown
  misc_feature (59)..(59): n = unknown
  misc_feature (70)..(70): n = unknown
  misc_feature (73)..(74): n = unknown
  misc_feature (84)..(84): n = unknown
  misc_feature (87)..(87): n = unknown
  misc_feature (94)..(94): n = unknown
  misc_feature (150)..(150): n = unknown
  misc_feature (158)..(158): n = unknown
  misc_feature (192)..(192): n = unknown
  misc_feature (227)..(227): n = unknown
  misc_feature (229)..(229): n = unknown
  misc_feature (232)..(232): n = unknown
  misc_feature (234)..(234): n = unknown
  misc_feature (240)..(240): n = unknown
  misc_feature (264)..(264): n = unknown
  misc_feature (300)..(300): n = unknown
  misc_feature (327)..(327): n = unknown
  misc_feature (341)..(341): n = unknown
  misc_feature (351)..(351): n = unknown
  misc_feature (384)..(384): n = unknown
  misc_feature (390)..(390): n = unknown
  misc_feature (448)..(448): n = unknown
  misc_feature (514)..(514): n = unknown
  misc_feature (522)..(522): n = unknown
  misc_feature (574)..(574): n = unknown
  misc_feature (583)..(583): n = unknown
  misc_feature (585)..(585): n = unknown
nccatnaaattngtaccaaaantaantttggatggggtcnanccgncccnttanttggnccaaaagtaanctnnggctttatcntantaaatanggcccagtttattttaaaccttaattctaatccttattggttattttaaaaagccntgagaccnttaagtaatattgctgcgtgattcccttaattgngcattcatcaacattaattttcggctaagttttgngntgngntcttgnaagtaactaataatatcggcttgnttttcaagaagttctgctatatttcttccctgctgnggaaaaccaacagcatcgctcctctgnccttctgacatggnggccatttgncttatccattcacttttcaaaacatcgggtggnaaatgnttcatattaaaatcaaaggccttattaatatatccccattaacttccattaaaactgntggttcacaataccaatatggtacatatccactggagaaagaatacttgcttcacaatggtttggnaaatcatnctcataaagtggttgcttaaaggttgcatacccattattcagcattccatanggatctccntnttaccgatatctatg

SEQ ID NO: 626 - DNA, 480 bp, Ctenocephalides felis
caaatttattgtagttgctgaatgatgacacgcatctggtgtcgaaacgtataaataaaagtttttaatactttataccttttttatttcgacgaatgggctgctagtcactttgaaatatgtatatatgttcgacattcttctcttattacctttgctagcctgcatgcatttatttataccccttaccccgaagggtcttggatcaaataccaaaatcctggtcaattccttacagcagagtaaaaaccaatgtcactactacacttcaatcttctgattgaaatcccattgctctaattactaatccaaaccaaactctatctattatgtgtttttgaaaatcaatacgcctaaaactacccgtaaactagactgctaataactggaaacgaatggcacactcactttatacgtctaatctaaaatatttacttcgtgtaatataatatgggtaatgcatgggagaggaaaggccgt

SEQ ID NO: 627 - DNA, 600 bp, Ctenocephalides felis
  misc_feature (589)..(589): n = unknown
acaaatatattctttaatacttactgtatagtgcattatagaacattatgatccgctaattatgttgatttaattaagtgataacgtaaatagtcaattgacgatttattacttttgacttaagtatatggctaaacaagttagaacaatttaaatgaccgacaaacttcatatttgtagttgatcatttcaggagatcattttaaatttttttggtttaagtttcaaaatagtaatattttgtttgtgaccctgggcaatgcgcgaatataataatatgattttatttacataatgaccgtattaattgaaataaattgacgtcgaaaatgtaatagttttaattatttatgatcaaacaactatcaaaacctaacattattcatgcattcaagtattagtgaatgtgccaatttaacatgttccggaaaaaattgatttaagtttggagcaatataaaataaaaacgaaacacaacgatttttcatgcgaataggctactgataatatgttttattgcttgccatttggttaattttatcagaaaccgttcgcatagatttaatcgggtttcgaaagccagttaatncagtgacgcat

SEQ ID NO: 628 - DNA, 500 bp, Ctenocephalides felis
accattaacttatttttagaaaaggttcaggtgtttttacatattgtctttctcttttttagatgacttttatccatttttaatttgggatgtgtgttattttcgatatgtagttcacatagaacacaaaaatatttaaagtttggatctcctaaatatgctggtgataaggaacgtaaagctaaactgggatcacactcaaagtgaagccatcttaaacacattccacattgttgccaagaactgctggatggtattaagtccccattgcaattgcttttgcaattaataaacgcgtcttgggaatttcttagacatagtgaataactgtaataataaataaacaactttatttgtaatacaaacaaacttgttaattctgataattcaaaattttgtgaaaagatatctttatcagaattctgatacaaataagcacatatatctaaattattatatttacttacagaactccggcttctctacaaaattctaattag

SEQ ID NO: 629 - DNA, 111 bp, Ctenocephalides felis
accctactaagaatgtgacagaattttaaagtcgggacgtttaatagttttcgagatatgcgtggtcgtttggtcgctggctctacgaccaatactaatatttaaacaggt

SEQ ID NO: 630 - DNA, 103 bp, Ctenocephalides felis
acacatcaaattgatttcaaatttaatgataattatatttatttcatcattctaagaataaagacaagcccatgcatcacattattaaacaggtgctttttgt

SEQ ID NO: 631 - DNA, 500 bp, Ctenocephalides felis
  misc_feature (70)..(70): n = unknown
  misc_feature (75)..(75): n = unknown
  misc_feature (79)..(79): n = unknown
  misc_feature (84)..(84): n = unknown
  misc_feature (87)..(87): n = unknown
  misc_feature (91)..(91): n = unknown
  misc_feature (97)..(97): n = unknown
  misc_feature (103)..(103): n = unknown
  misc_feature (108)..(109): n = unknown
  misc_feature (112)..(114): n = unknown
  misc_feature (116)..(118): n = unknown
  misc_feature (121)..(121): n = unknown
  misc_feature (148)..(148): n = unknown
  misc_feature (199)..(199): n = unknown
actcacatctatctaaacatacatatatgatttgcagaaaataacattttcaagtcatatatgacttggntttgntcantaccnttntaantttggnaatggncctannggnnnannncanggcttatttataatgaatgtaaatgcncaaacatgtgaataatattaataggattagtatgcacgaaaaaattaatancaataaaaaagaaagttttggattttagattgagaattaaaaattaatatattagatgtaatgattaaagtgcaaatgtttagctatattttaattgttaacagtggaatgtttattttgtattgaaatctgttattgctaatgtgataaacattttttctgtgttatgcacatcaatttttggtattactgtgttttaactgtaaattataatattgcaaaaatacattagtatattttttcatgaagttactaaaaataattttatcattttcaaaattattgtgcgcatgtatttaag

SEQ ID NO: 632 - DNA, 500 bp, Ctenocephalides felis
  misc_feature (63)..(63): n = unknown
  misc_feature (252)..(252): n = unknown
  misc_feature (406)..(406): n = unknown
  misc_feature (412)..(412): n = unknown
  misc_feature (419)..(419): n = unknown
  misc_feature (426)..(427): n = unknown
  misc_feature (431)..(431): n = unknown
  misc_feature (433)..(434): n = unknown
  misc_feature (436)..(436): n = unknown
  misc_feature (442)..(442): n = unknown
  misc_feature (444)..(444): n = unknown
  misc_feature (447)..(447): n = unknown
  misc_feature (472)..(472): n = unknown
  misc_feature (478)..(478): n = unknown
  misc_feature (495)..(495): n = unknown
actaaatgttaattgtgcgagaatggtggatgaatttataaagaaacatatgggattcatatngaattaataaatgtaatgcaatgaaaacattcgtattaacaaattcaataagaaacaacacgaacttaatacttgtaacatttgtcaatgcgaatggttcttgcaaaaaagccaatacaaaaaatggcaaatattatatatgtatccttgaattatttaatttttttcaaacaattttccaaaattccnaaaagagagaatgtataattcagggcagtagcttaatgataaaacgatcgccggaagcattttagcttactatgacatgactattatgaaaataaaattgatataaaatgtgaaacatttgaactataaatattatatttaataataaatttgntattgntatatcnacaaaannaaananntngctgtnanaanaaaaaaggttgaacttgggccgganacccgntaggccgaattttgganatttc

SEQ ID NO: 633 - DNA, 392 bp, Ctenocephalides felis
acaatgtgattcacggaagccaatttttcttccaatcacacaagatgaccttgaccttgtgcgtttgtggtcacaatttagaacaaaacacatccaactcttagcaaaattacataaacagtaaaatactttaaataaataattagccgtcaaaactcccaccaaattttatacgtctgtttttccgtgtggaggatactggcaatgagaactggtttcactaaactcggcgctcttcaaacatttcgaaaatcttagggagaacaaaattacaaataattagtcatattacttacattatctttatttacatcgtttagtcatctactttttttaattatttatagttagaattacaaattgatttcagacttaagcttttcaaactgtgt

SEQ ID NO: 634 - DNA, 413 bp, Ctenocephalides felis
actacattggaaacagccagtgatataagcaataagcctccaccgccattaaagctgctaatgaatccgtatggtaaagttttagacataaatactgtgtataaagaaactggaaccgaaccgctcagtccggatttaaccttcaatatcgtcaatgctctgaacgcgagcaaaggcagaggtgctgaattgttcgctaagcgccgcaagaaatctgagaagtggatcgtagatgaaacaagaactactgaaaaaataatcaacaaagaaaattctgttcagcagtattggaaaccatcacaaagtccgttatgccagactaatcgattgggttcttgggaaaaaccaaaactgcaaagtaataacaaagagtgcctttatacttctccgattcaatactaccaatcgtgcgt

SEQ ID NO: 635 - DNA, 649 bp, Ctenocephalides felis
  misc_feature (8)..(8): n = unknown
  misc_feature (66)..(66): n = unknown
  misc_feature (441)..(441): n = unknown
acatgagnaaaaagtgtggttatatatattttttatatttaataaatgatatattcaaatgcattnttttttaattctctatcatattcaaatgcgcttatgatacaagtgcaaaaattacatgcagttttcataatccaaaagattttataatcgtgtaaatgtatttatagagattgcactactaggtgggcgcaataataatgctcttactaaataatttaatacatatattagaggcaccactctagccttatgctaattgatttgatctatattcagaaatgataaaaattaattcactgtagcagtattattcagttgttttaattagaattttaatctaaattgcaaaatttgtatatgaaataaaagaataggtaatacactagaatacaatgaaataaatgcaatgaattagatcacaaatcattgacttgnttttttatattaaattcaaaagtttttataaaacatttcattgaattaaatcaataaagaaagatagaaatccaaatattacaagatacattattgatattttataataatagtatgaatccataactcatgtggcacagccattattaacaattaaattaacaatatgaaaatcctaatattaaaactatatttaagaaagcacatt

SEQ ID NO: 636 - DNA, 500 bp, Ctenocephalides felis
  misc_feature (70)..(70): n = unknown
  misc_feature (295)..(295): n = unknown
  misc_feature (330)..(330): n = unknown
  misc_feature (390)..(390): n = unknown
  misc_feature (401)..(401): n = unknown
actcacatctatctaaacatacatatatgatttgcagaaaataacattttcaagtcatatatgacttgantttgctcattaccatataattttgagattggcctcatgtgatgagacgaggcttatttataatgaatgtaaatgcacaaacatgtgaataatattaataggattagtatgcacgaaaaaattaataacaataaaaaagaaagttttggattttagattgagaattaaaaattaatatattagatgtaatgattaaagtgcaaatgtttagctatattttaattgntaacagtggaatgtttattttggattgaaatctgntattgctaatgtgataaacattttttctgtgttatgcacatcaatttttggtattactgngttttaactgnaaattataatattgcaaaaatcattagtatattttttcatgaagttcctaaaataatttatcatttcaaaatatgggcccatgtttaagggaaaatgaa

SEQ ID NO: 637 - DNA, 500 bp, Ctenocephalides felis
  misc_feature (70)..(70): n = unknown
  misc_feature (430)..(430): n = unknown
  misc_feature (436)..(436): n = unknown
  misc_feature (461)..(461): n = unknown
actgaattatatcttaattaaattttggtatatttcgtagaaatataatcgaggatcttttcttcaagtnccaaatgatactgttacgacaagcccctagtcgtcctatttaatttcaatttttactctaattgtcgtttacaattgattttgagctgattttccgtggctttagacacgtttttccatggtttggcaaccttgttcgattttttagttcttttatattgaatcgtatgatcgttgttcctttaattttctttttgaaacagtccttgtgtggtttgattcactattttacttttaggctgcactcatagtcagtaattaatatacacgattgctgatttcatataaaagtaatgtaatgtaaaactagaaatttcataaataatcaatactaaaaactaggaacgaaattaaagtctgncacttncttttgcatatagtccttctaaaantagaaactcaagaagtttaactatgttgcaaagtttcag

SEQ ID NO: 638 - DNA, 500 bp, Ctenocephalides felis
  misc_feature (4)..(4): n = unknown
  misc_feature (10)..(10): n = unknown
  misc_feature (26)..(26): n = unknown
  misc_feature (47)..(47): n = unknown
  misc_feature (76)..(76): n = unknown
  misc_feature (150)..(150): n = unknown
  misc_feature (194)..(194): n = unknown
  misc_feature (273)..(273): n = unknown
  misc_feature (276)..(276): n = unknown
  misc_feature (437)..(437): n = unknown
  misc_feature (473)..(473): n = unknown
acanagctgnaattaatattatattngtcggagggcattttcaatcnatatcctatagtcgaagtgtcgatgtgangagtccgcatttattattcagacttctccatttcccgctttaacgtttcgatataaaatcggttatgatacctnctaaattctttacggccttattttagctttttattgttccgtgntttgtatactgaaataatgatgaatgcgcgaatatttaatttacagtcttcaaaggatatctaaatgttgtcgttttgncgntcgtctgcctgtccgtctattgggcttttgtgaattaacaataaataaatatgtattataacagtttagactatcgtatggtagcaaattattttattcaactaattaaaaaaacaggcattatcgatttataattcttgaaaatctaaggtgtgataaanaaaactggtggtgtatggagaggagaccctattttntcaagtaaaaccgggacgataatttta

SEQ ID NO: 639 - DNA, 112 bp, Ctenocephalides felis
  misc_feature (64)..(64): n = unknown
  misc_feature (81)..(81): n = unknown
aatttccataattataatactataatttatctttttgatcgctttatatgtgcaaatagagcangccaagcgcgcatcttngcagaattgcgaggaaggtattcggggccga

SEQ ID NO: 640 - DNA, 500 bp, Ctenocephalides felis
  misc_feature (31)..(31): n = unknown
  misc_feature (54)..(54): n = unknown
  misc_feature (158)..(158): n = unknown
  misc_feature (174)..(174): n = unknown
  misc_feature (251)..(251): n = unknown
  misc_feature (261)..(261): n = unknown
  misc_feature (310)..(310): n = unknown
  misc_feature (388)..(388): n = unknown
  misc_feature (410)..(410): n = unknown
  misc_feature (469)..(469): n = unknown
  misc_feature (488)..(488): n = unknown
  misc_feature (498)..(498): n = unknown
acgaacaaagttttttcgtatcttttactgnttagctagtagagagcaatctgngtgattgatcacttattgaaatgcaaattacatttagattgcagcaattattgacaatatttctatattttcataaagaaaccatataaattataatacattgntaaaatttcgtatggntctccagtcattcaattctaataacaatcaccatttaggctaaaatcttgcatgttttctgccctcgaacaaacggntattcacggncagcgtgtttagatatagcagcagagccgcatattcagttcagcaagcnttcaagaataaaagaataaaataatatttattaaatatcaactaatatataatcttttctcggcaatgaatataaganattattattttattctatacantggattaaaaaaaaaaaaacataaatttatttttattattaatgctaaattatttatcnttcgtttattttaataaanataattgaanga

SEQ ID NO: 641 - DNA, 322 bp, Ctenocephalides felis
  misc_feature (1)..(6): n = unknown
  misc_feature (17)..(17): n = unknown
  misc_feature (22)..(22): n = unknown
  misc_feature (30)..(30): n = unknown
nnnnnntttagccccgntgtgnttcggcgncgcccggcggtcatattaaaacaaccggcgccgggtttttcaactgaaagaaatgtttttttaattcaattatttataattaaatacaagtgaataaaaattacatttaagagtattattattgcttaacaaaagagtattaaaaaagtctactgatcataaatcaatagtataggaaaagattggtaatatattggatgaaggtaaaatacacaagaaatcaataaacaaaaataaatattgtgaaagttatttacgcgtatataaatcatcttttaacaagcatcatcgt

SEQ ID NO: 642 - DNA, 500 bp, Ctenocephalides felis
  misc_feature (345)..(345): n = unknown
  misc_feature (348)..(348): n = unknown
  misc_feature (390)..(390): n = unknown
actccgcgaatctattgtcaaacatgcttttaataccttttatcatttctgaagaatgttgatcccaattatcattatttaacctttcaagataagatttgaagcttttgttgccttcttaaaaaatttttaagttctgccattttaattgtttttagaactcaagataacttaatttaattttttgatagggaagcgcaaaccgttacaaaattttacgtataacaggcgttatgcaatatcagcggttatatcagaatttaaatctataatcaattgattatttaacaattctaatttaataatattagaattggagtctagcacatcagtaacataagttgnggngttaataaattaacaaatatataaaccaataattagtaatgnttataataactaatataatatttcataacaattaataacctaaggatttacgaaattggcccaaaatcttagagcaagaccaatttcaatcaataatatggtcaggttta

SEQ ID NO: 643 - DNA, 127 bp, Ctenocephalides felis
actaaaattggttacaagtcgaagtccagtattataaaaaagttttttccaaggaacatacaattctttaatgtatggcaaacatattacaccagaatgagtttctgagtcaggtaaatcgttatgt

SEQ ID NO: 644 - DNA, 393 bp, Ctenocephalides felis
acaaaaaaatgtcccgggcgttaaacttaaaaggcattggtctctgaaacaaaatcttgcttgaataactaaattttttaatacaagaattaattattcggaaaaagtttgagattgttttaagcttaaaacacttgtgaaaagttttataaaggaaagtttcatagttttggagatatttaattaattgtgcaaaaaggtcctgtgcgtcaaacttataaggaatagttttcttgaacaaaaattagtttgaataactaatttttttaatataaaatttaattgttgggaattgtggtgtatgcaaacgttttagatttttttatgcttaaaacacttgtgaaaagttttatgaagaaaagttttatagttttggaaatattcaattaattg

SEQ ID NO: 645 - DNA, 394 bp, Ctenocephalides felis
actttaactcaatgctatttatacaggttacaatattatatattaacccatctgagtattggaaaaaaattaatactgcttattataatttgtgataaagcacaaaattcttaatttgtcactgtatttttacatatgcttaaattataatttaatattatttttagcatttgttggtaacttttaattgtattctactgatatagatttctatgtaaggaggtttaatggtttttttacaattcatgtgtggtattttgagaatcaagaaagcttttctctaatattttatacctctaaactgaattgattaactctattttttcttaatatttataacctcctgctcctccgcgctgggtgcgaggtattgattgcttggaccgcgcgaagt

SEQ ID NO: 646 - DNA, 435 bp, Ctenocephalides felis
  misc_feature (14)..(14): n = unknown
  misc_feature (16)..(17): n = unknown
  misc_feature (28)..(28): n = unknown
  misc_feature (30)..(30): n = unknown
  misc_feature (33)..(33): n = unknown
  misc_feature (44)..(44): n = unknown
  misc_feature (79)..(79): n = unknown
  misc_feature (82)..(82): n = unknown
  misc_feature (86)..(86): n = unknown
  misc_feature (89)..(89): n = unknown
  misc_feature (92)..(92): n = unknown
  misc_feature (94)..(94): n = unknown
  misc_feature (100)..(100): n = unknown
  misc_feature (106)..(106): n = unknown
  misc_feature (108)..(109): n = unknown
  misc_feature (121)..(121): n = unknown
  misc_feature (123)..(123): n = unknown
  misc_feature (142)..(143): n = unknown
  misc_feature (145)..(145): n = unknown
  misc_feature (149)..(149): n = unknown
  misc_feature (151)..(151): n = unknown
  misc_feature (156)..(156): n = unknown
  misc_feature (163)..(163): n = unknown
  misc_feature (179)..(179): n = unknown
  misc_feature (186)..(186): n = unknown
  misc_feature (188)..(188): n = unknown
  misc_feature (191)..(191): n = unknown
  misc_feature (194)..(196): n = unknown
  misc_feature (201)..(202): n = unknown
  misc_feature (207)..(207): n = unknown
  misc_feature (227)..(227): n = unknown
  misc_feature (256)..(256): n = unknown
  misc_feature (273)..(273): n = unknown
  misc_feature (278)..(278): n = unknown
  misc_feature (280)..(280): n = unknown
  misc_feature (282)..(282): n = unknown
  misc_feature (309)..(309): n = unknown
  misc_feature (311)..(311): n = unknown
  misc_feature (314)..(315): n = unknown
  misc_feature (322)..(322): n = unknown
  misc_feature (324)..(324): n = unknown
  misc_feature (326)..(326): n = unknown
  misc_feature (340)..(341): n = unknown
  misc_feature (343)..(343): n = unknown
  misc_feature (345)..(345): n = unknown
  misc_feature (350)..(351): n = unknown
  misc_feature (359)..(359): n = unknown
  misc_feature (361)..(361): n = unknown
  misc_feature (364)..(367): n = unknown
  misc_feature (369)..(369): n = unknown
  misc_feature (374)..(374): n = unknown
  misc_feature (378)..(378): n = unknown
  misc_feature (382)..(382): n = unknown
  misc_feature (384)..(384): n = unknown
  misc_feature (387)..(387): n = unknown
  misc_feature (399)..(399): n = unknown
  misc_feature (416)..(416): n = unknown
  misc_feature (418)..(418): n = unknown
  misc_feature (422)..(422): n = unknown
  misc_feature (435)..(435): n = unknown
cgcgggctccgatncnnaatgcacgacntntanggcatgcgtgnaagtgcgctattaataatacagttacaaagattantgnaacntanaantngccaancggaangnntacgttgtaatnanagggaaaacgttttttcanncntttntntggantaagatngttaaattgccgattntcaacangnatnggnnnagtannaaacnaggctcaacggcaaatgccntccacctaaattattttgtgaacccaaanaaaactatccatacttnattantntngacggtgtcggtccattaaagcatgananttnnccgcatntntntcggtttttgacannangngtggnntgcaaacncngannnnangacanactnaatncnagnatgagtgagtgngcgtgagttagagcatncnaaanggatgcgccgttn

SEQ ID NO: 647 - DNA, 492 bp, Ctenocephalides felis
  misc_feature (3)..(3): n = unknown
  misc_feature (43)..(43): n = unknown
  misc_feature (86)..(86): n = unknown
  misc_feature (88)..(89): n = unknown
  misc_feature (107)..(108): n = unknown
  misc_feature (145)..(146): n = unknown
  misc_feature (152)..(152): n = unknown
  misc_feature (172)..(172): n = unknown
  misc_feature (175)..(175): n = unknown
  misc_feature (243)..(243): n = unknown
  misc_feature (261)..(261): n = unknown
  misc_feature (337)..(337): n = unknown
  misc_feature (386)..(386): n = unknown
  misc_feature (389)..(389): n = unknown
  misc_feature (391)..(391): n = unknown
  misc_feature (405)..(405): n = unknown
  misc_feature (435)..(435): n = unknown
  misc_feature (460)..(460): n = unknown
  misc_feature (476)..(476): n = unknown
  misc_feature (484)..(484): n = unknown
  misc_feature (489)..(489): n = unknown
tcntacactacaaaaatgatttttatatttaatgaaaatactnatttataaaatatctcttcaataagctatagttataacaggcncnnttaataattatgaattgnnttgaaaatgatttacaataaagctatgtgaaacaagnntgtgtngtatataacatcatcgcgtnggncgggcttttccttgttactatatttttaaaaatttaataaaattagctttgtagcaaatgctactgtntgataattgaattttcangaatagtaggagttgtagcaggagtcttgttagcttcacgccatgcttcatcaaaattctgaatagaattagaacnagatgatgaaacttttgtcttaacgttttcataggctggcccatttttnttntngtgatttgaaagantcagaatttctcatctgcccattttggtgnaaacccccgtatttcccttacaaanaagagtttttcggggnagaattantactnggc

SEQ ID NO: 648 - DNA, 417 bp, Ctenocephalides felis
acgccgttggcgatttccgtgaaaatgtttgacaatgtttgttccagggttggcttgaactcttggaagaatagtcttgcgttgtcgttcacagcctggctaagaattgttccaagggtttgatcgttgttaaagagaccggataggcgtattttattgtttcccaaaataattttcatgtcgattggtttgacttggaggcattcgattccgcgacaactttcttgtagccatgtatttgcatcctggcgtggtaatcagctgaaatagtaatataaataaattactataaatacgcaattactagaaatagtaatgtaataagttaacacgttcgcgggtgtgaatgctatagcattcatcgtatataacgattaaaatatgatgattttaatactaccaatataatatgaatgt

SEQ ID NO: 649 - DNA, 500 bp, Ctenocephalides felis
ttctaaaataatattgaataaaaaatagtagatacaatcagtggcttgtataatagggatagctataagtagtgaaaatggaagtgcttattagaaatacttttacaaaacgaattgtaatgattcagtagcaacatattaaaaaataaaattgtcaaaatacttgcttcaaaattatgctagtattcttctcatgaactaacattagcttaattttataattaactaaaatttttgaatatcctcacattatcgcaaatccttggtgactacatcgtcttagcatattacctagaaagcatttcaccatcaactgacaaatttattggacaattgatgcctaacgtaattaccaatgtttacatcaagtaagatgctaataattaacgttatctatgtgcacgtaaataatgaaacaataaaatttcgtgagtttcttaagcgtgcgtccctcagaggtcaaaaagtcgaaaagtcgtagggtcatgatcaacgaacgc

SEQ ID NO: 650 - DNA, 500 bp, Ctenocephalides felis
  misc_feature (498)..(498): n = unknown
acctactatcacagtttttttttactaacagtttagctataagtaggatggtgaaaacttttaaattttttacatcttactagcgattttgataatactgattcattggttataaatcttcaaagaaattcttagttttctacgtatactcaaaacgtagtcaatacgtatatatccaaattttacaccccatttgtgcgatttgctgcgcataattatatttacttcgtatattgagcagttactaaaattgtatactacgttttcctgaatattattgaacatgtgttgaataaatttacaccttacctttattgaaaatatttgtttgtcgatagtaatacgtggtctttttacaacaattttgattgctgtcaatgtagttgaaccaacctttgggttcaaaacaaaacctatcaatttgttgtttggattccttcgtaaaaatctgctacacatagacattgagcaaaaatcagaaaacccctttgtatccgnag

SEQ ID NO: 651 - DNA, 483 bp, Ctenocephalides felis
acacctattaaggagcaggtttcaatattactcctaatgacctattgcttacacattgttatataaacatcactaaatatataccatcaaaacttctacaagctaaagcagtaaatcattaattaacatctagaatatacaaataagttttcataaaattttcctattctgttctaaatatatattttgtgcatcgcaatgaaaatactaagacgtatatattaatattaaaatatgtaataacttacaactgtcataaagatagtgagttataaatgaaaatatctcagatggtatagataaatttcaaagttttaaattaaaaactttttcgaaggtaacgcgaagtgcaaacgaaagtttcaccataaatagttttagttcattttaccataactcgcgataatactaaatcgatgaaaggctgaattattaaagttatcagaacaatgaactgttagcacacatatgcacatgtatatg

SEQ ID NO: 652 - DNA, 500 bp, Ctenocephalides felis
  misc_feature (382)..(382): n = unknown
  misc_feature (388)..(388): n = unknown
  misc_feature (396)..(396): n = unknown
  misc_feature (447)..(447): n = unknown
  misc_feature (457)..(457): n = unknown
  misc_feature (475)..(476): n = unknown
acctcatgagcagttgcatcaatcataagtcgttgctcgtagctcatcgcaagcaggtgcccgcaaattatcgcatggtgattcttgagtttctcgttaattctaaaatgtaaaataatttacatgtaatatatacccaatacactattacatatgaaaacttattatatatttcttcaattcaattattattattatattcaatatatctagcaaataacgatcgcccatctcttcgcgttcagtgttgatgtcaaacctgttcaaaggagattggaaacacgttgtatttaattgtggtagatatggtgttatcctcttttggtgcgaatagtattatttttgactagcttattgaataatgacccataagtatggtttnaaaaantcttagcntttccatgtaattattttgaaagacatattgacaaatcgttgcacaaaganctcccatttngttatgaaattcagatgnnttagttttagaaggggctatttat

SEQ ID NO: 653 - DNA, 500 bp, Ctenocephalides felis
  misc_feature (37)..(37): n = unknown
  misc_feature (445)..(445): n = unknown
  misc_feature (453)..(453): n = unknown
  misc_feature (485)..(485): n = unknown
acaatgtatattgaataagatgtgagcgataccttgnagggatgtcgcattgagaatttaggtgtggaaaattgcaatagcattaaaatataccatttgaattagatttttaaataataccaaaacaaatcataaattaaattctttcgtagatattcatacataaatattggctttccagaaagacaactatgtagatttcacattcactccaaaattaatgagttattatataacaaatttttaaataacttatatacaaacactatgcacaagtgttgatgatatatgaccttaaaaagtaattaaatattgcgcttaaaaatcaaatttacatacacatttacccattctatctctagaaaactagaacagatattcttatgaaaaatttgctattttaaatatctcaaaggtttggaccatcttcataataaaatccgtnctcggcgngacacgctagcgatctgggatttcatacctgnggcggtcggctgctt

SEQ ID NO: 654 - DNA, 330 bp, Ctenocephalides felis
  misc_feature (1)..(1): n = unknown
  misc_feature (7)..(7): n = unknown
  misc_feature (38)..(38): n = unknown
  misc_feature (67)..(67): n = unknown
  misc_feature (81)..(81): n = unknown
nccgcanccaaataaactcctcttcataaattaatccnttatgttaacaatttttttaaatattganaacaacctttaaanatcgatgaccttaacatattaaagccttacttaccgcaaaatgaagatcaaattgtggattgtcttttattttttacacattccaaacttttgtcaatgacaatataatattaataattttcacttattttatgtcacacttattattattattatgatcgaaattaattttaatttaataattaatattcgttgtaacctcatggaagtatcggtcttaactacgcggctttgtaacgataacaatgt

SEQ ID NO: 655 - DNA, 500 bp, Ctenocephalides felis
  misc_feature (1)..(1): n = unknown
  misc_feature (16)..(16): n = unknown
  misc_feature (38)..(38): n = unknown
  misc_feature (44)..(45): n = unknown
  misc_feature (60)..(60): n = unknown
  misc_feature (62)..(62): n = unknown
  misc_feature (78)..(78): n = unknown
  misc_feature (82)..(82): n = unknown
  misc_feature (92)..(92): n = unknown
  misc_feature (100)..(100): n = unknown
  misc_feature (110)..(110): n = unknown
  misc_feature (126)..(126): n = unknown
  misc_feature (138)..(138): n = unknown
  misc_feature (143)..(143): n = unknown
  misc_feature (183)..(183): n = unknown
  misc_feature (231)..(231): n = unknown
  misc_feature (234)..(234): n = unknown
  misc_feature (251)..(251): n = unknown
  misc_feature (272)..(272): n = unknown
  misc_feature (295)..(295): n = unknown
  misc_feature (300)..(300): n = unknown
  misc_feature (348)..(348): n = unknown
  misc_feature (352)..(352): n = unknown
  misc_feature (371)..(371): n = unknown
  misc_feature (391)..(391): n = unknown
  misc_feature (416)..(416): n = unknown
  misc_feature (420)..(420): n = unknown
  misc_feature (423)..(423): n = unknown
  misc_feature (458)..(458): n = unknown
  misc_feature (488)..(488): n = unknown
  misc_feature (490)..(490): n = unknown
nttctagcccttgggnttttattcccctaacggggccncgggcnngggaccaaaatagancntaatatttttaatacngggntaaaagaaanggtaaaantttgggaggntttaaaatctctaacnagggtaaacccnaaacnaaaaaaataatttaatcattactctctttaactttatccntggcctttataatacttatagataaaatagaaaatagtttaaattttnctnaacaatgaattcattgntttagagacgctctttactgntctatcctacaaaatactatacnagccnagtatttttgaatatgaattggatatttctaataaagctataaatacntacngtatttttgaatttaaacntttctttatggtatcttccncagatatttggtttccatatctacnatcnccntgaggtttcttctaatttcatcaattcagaagacntttctttttcaattttcattatatttgccncnggatttcaac

SEQ ID NO: 656 - DNA, 73 bp, Ctenocephalides felis
acaaaaacataacttcattgagaaaaagcaattaaatcattttcacactttctaattaaaatgaaatgatcgt

SEQ ID NO: 657 - DNA, 425 bp, Ctenocephalides felis
  misc_feature (49)..(49): n = unknown
acacccctgatattacaagttgctaaccactgtcataatattagatttntaacaagtccagactgaaatcttagaacccttgagctttagctgatattaacggttcatattaacttttctcagactattgcgtagtagctgacattacacattctctcacgaaatcataaacctacatcgacaaatctcagcaagatcatattatcgacattccgcctagttaacaattttcaccaagtttgcatgaataacattttgtttaatcggctaaattcattactttgtccttttcgttgcatagaatattcgagacaaatccccactacgtttcaaaggattttagttttaataattatgaaataaatcagtcttaatctgtcggtcgccgggcaaacacttctctttcaataccttcgggttccttg

SEQ ID NO: 658 - DNA, 500 bp, Ctenocephalides felis
  misc_feature (10)..(10): n = unknown
  misc_feature (199)..(199): n = unknown
  misc_feature (210)..(210): n = unknown
  misc_feature (404)..(404): n = unknown
  misc_feature (453)..(453): n = unknown
gatagatccntttcatgatcaacataataatacaaaattttaactcaatttcaccgaaatgcttaaaatgtaaaaccttgccactcgctcgccaattaaatcttgaacgaaatagaaaacgacgttgctctttcaaatcttgcataatattattcctagaacacttaataaaacaccgatttaataagatttttattgncattattttgntcattacatgattttcgttaaaatatatattttaggtatttgcaaaaaaacgacgaaaaacgacgaaaaacgccaaaaatatatgaatctttagtagccagtaacttgaaaagtatgaagtttttttgaaaaactataaaatccttatttttaaaaaaatacgtaattaaacaattgagaagaacccgaattgntttcacttttgaacttggtgtagatgaacctaattcctaatttcatgcnattcgggacacagtaaaaaattcagacacaaaacgctcgttactgcc

SEQ ID NO: 659 - DNA, 500 bp, Ctenocephalides felis
acaacattgttgtaaataatatgttctcgatccaaaatacaatactgtagggaaataatatgtgctcgaatttaaagaaatgtccgggctcgtgtaaactacatatatgatgaataatataatcatcaaatactattgggtataaagaaaatgcattgaatattccagagtataaataataactactttacgctcccgggtgggctcgaaccaccaacctttcggttaacagccgagcgcgctagccaattgcgccacggaggctcttatcgcttcttgataatagtatgaataaattatttatagcatgaacaataattataattattgaacaataatgagtataaacaacaattattcttatacccaataaactacactaatctgtaacccacggcgcaaccagtgcccaatacctgtcatacatcgcgctcgattcacttcacacacaaatagttaacatttacttcactcctataaactatacaaactatcaaagt

SEQ ID NO: 660 - DNA, 500 bp, Ctenocephalides felis
  misc_feature (449)..(449): n = unknown
cctttagcgaaccgcgtcagaatttttccaggattcctcaatttgtttataaaaatataataaattttcaagtatttcaattttatttgtaaaactacatttttgtatcattattatcacgagcaagtattttgtgccgttgtagaaaacagctggaagcacttaatgcttattgtgttcatgttctcattactcaggaatatgagaattgagaaatgtttcatttgtaagtccacactttttcattcattagaaagctctcgtcttgaagtcgtttactcaataatttacatgtttatctaaataaagaaatagtagaaacttaaatacaaattggaataagagcatcggtagaatatagtataaacaacaaagcaattttaaatcattaaattacaaaataatcctcagtttctctattgtcaaagggatgtgaaatattttgatgnttaattttcaaaatcttttatttaattaatcaaaatattattccagcgact

SEQ ID NO: 661 - DNA, 412 bp, Ctenocephalides felis
actttttgatatttatgtaatgattatttattcaccgatgttaacagctcaacgtctgaacgaatactccaattaaaggttggatcagcgaattattattacaaatgaagatactgaggaatgactggagatagctgcaacaaactatttatgtaaatacaagcagtaaattacctgcaacagttttacacaaagtattgtattacgtaatagccggtggtgattttctgtttcaaaaagttataacttttcaagactgccagtatggtcaagactactgtataaaattatcaacaaattatagaaatatttacaataaacaaggttttaaattttaaattatataaataaataaatagtttgatactatttaacaatatggttaattatattgctcttcgaatgatatttg

SEQ ID NO: 662 - DNA, 500 bp, Ctenocephalides felis
accatagtggcgcttagactgtgcttagcttgggtaaatttttaaaattttgaatccaaaattacataaattttttatggaaaaataattgtttatcctcaaaagcaattgttttgtcaatacaagcagaaagtttagtcaaaattctagtagatactttataagaacaaaaattaggcaaaataatattttgatttttggcaagtttcaagtggtaaatagttacttaatgcaattgactccattgtaaaaattggtgagggtaagttatagtaatagcaaaaaaaaggagaatgaaatatttcacatgtctttacattgcaaaggtttctgatcgttttaaaaaaaatgatgtatgaatgtgtgtgagaagtaatttttctcattatgttatatttaataaaaagtaaaaaatcagaatttagggataaaagtagtttatgctgataaaaaatctatatgtaaaatttttaggtatatcggtccagtaaaaggtgaga

SEQ ID NO: 663 - DNA, 500 bp, Ctenocephalides felis
  misc_feature (1)..(1): n = unknown
  misc_feature (5)..(5): n = unknown
  misc_feature (32)..(32): n = unknown
  misc_feature (48)..(48): n = unknown
  misc_feature (57)..(57): n = unknown
  misc_feature (71)..(71): n = unknown
  misc_feature (86)..(86): n = unknown
  misc_feature (131)..(131): n = unknown
  misc_feature (133)..(133): n = unknown
  misc_feature (140)..(140): n = unknown
  misc_feature (163)..(163): n = unknown
  misc_feature (175)..(175): n = unknown
  misc_feature (184)..(184): n = unknown
  misc_feature (186)..(186): n = unknown
  misc_feature (214)..(214): n = unknown
  misc_feature (228)..(228): n = unknown
  misc_feature (250)..(250): n = unknown
  misc_feature (288)..(289): n = unknown
  misc_feature (351)..(351): n = unknown
  misc_feature (366)..(366): n = unknown
  misc_feature (378)..(378): n = unknown
  misc_feature (387)..(387): n = unknown
  misc_feature (445)..(445): n = unknown
  misc_feature (462)..(462): n = unknown
  misc_feature (483)..(483): n = unknown
ncatnaattacttgagccacaatgtataaatntttcactattaagatntataacttntctttttcaaatcntattttgggataaantaacttatcataaaataaaatactgggtaaaagtatggataaaantnatatcancaataaattttcatgaatctatntaataaaatggncaacatcgntntttaataaatgggcttcaaatttgactngaatgaatacttgntattgcttcctaggtaaaattnatatttttaatggacaaaatgttactataatattcttnnatttatataacaagaaaaataattctaaaatcaatttctttgattcacctgttattttccangtgcgcggtaaaganaaaatagttacngaataatanaaatcaaaagtgaaccggactgtgtgcaaattttatgatcgagatcttgaacagagtntttgtaacacgcatctntggtttagtgccattgaatantgttatggtgggggtgc

SEQ ID NO: 664 - DNA, 295 bp, Ctenocephalides felis
  misc_feature (53)..(53): n = unknown
  misc_feature (62)..(62): n = unknown
acttatgacatatcatattataagtttctaacaataatccagtttcactaatnaatattccnggaactatgcttatgaaaaatgaattaaataaaacatgaattgctacatttattcaaaatttttgaagcattaacattagtatacagcatagaatgctacaattagccagatagtcagaaatcatttcaaaaattctccgttcatggctttgttaacaacaattattttaaacggatgccagttagattgttttagaataaaacttttgagagaaatataatataataatagt

SEQ ID NO: 665 - DNA, 310 bp, Ctenocephalides felis
acttcaaaaacgcgtataaatagcgcgaagtctaattttctagtttttataattaattaattttcacaggcctataatattttaatattatgattttgtttatcatctctatcaccatgcgacgtttcataaattttgcagataagtatatctgaggttctccttgtaagttgtccgtgttatttaaaacaagtatgatttaatttagcaagaaccaaaattagatacttttaaaaaaaattaaaaatgtaaaaaaaatatttgcaaaattttccccatatactattccacttaaaaatgcccctgttgt

SEQ ID NO: 666 - DNA, 365 bp, Ctenocephalides felis
acaaagcatctacatatcggagcctccagcaatattttcgcataatatttttctgcgatcgattttctgtcaaacgctactcataaattataccgacagaacgaacgtagcgaacatgaaaaatatctgcgcaaaatctgcgagctataattcaaactttaaatatagtcccgctttcacaaacagaagatcagatcaaaagcttcgatacggcgataaatcggatattataccgactcaaaacgtcgagaatggagaaaataatacgatgctgtcgaatccggtaatagatttgatagcaaagtataaagttgtgtaattacaaacccataaatcattttctccataaatatcaaaatctcggt

SEQ ID NO: 667 - DNA, 385 bp, Ctenocephalides felis
  misc_feature (4)..(4): n = unknown
  misc_feature (12)..(12): n = unknown
  misc_feature (23)..(23): n = unknown
  misc_feature (27)..(27): n = unknown
  misc_feature (36)..(36): n = unknown
  misc_feature (115)..(115): n = unknown
tggngtttttantgggacttttnaaanccccgccgngcagtacctttattattatgctttggttcacgtcgggtataaaatgttttgaacaagacaaagtataatataaataagnataaaatgttttgaacaaaactaaattaatatataccatttctgggaaccattgcagactgataagatatcaaatgctattgaaacgatatgatttcaagaatcaaaacgctttcatctatcttttatatttggctatatttgtcattttccatttatacagtgaaagccgactattttcactaaaaaaccggtttttgaattccacaatttccgcaaaaaaccggttatcaaaaccggtttttgaaaaccgacaaatcctacttacagt

SEQ ID NO: 668 - DNA, 160 bp, Ctenocephalides felis
  misc_feature (4)..(5): n = unknown
  misc_feature (7)..(7): n = unknown
  misc_feature (9)..(9): n = unknown
  misc_feature (19)..(19): n = unknown
  misc_feature (23)..(23): n = unknown
  misc_feature (25)..(25): n = unknown
  misc_feature (32)..(32): n = unknown
  misc_feature (39)..(40): n = unknown
  misc_feature (46)..(47): n = unknown
  misc_feature (58)..(58): n = unknown
  misc_feature (67)..(67): n = unknown
  misc_feature (90)..(90): n = unknown
  misc_feature (133)..(133): n = unknown
  misc_feature (155)..(155): n = unknown
aggnntngngaaccctttnaaancnagacttnctttaannccccgnnagttacatggntcaaggagnctagccgccatcagggaaagttncagacataccgtttatgtcgaacaaatgaaagatggcgaaggngctgtcaaactggaaatttcanaatgt

SEQ ID NO: 669 - DNA, 320 bp, Ctenocephalides felis
  misc_feature (38)..(38): n = unknown
atattgcttctacaaatgcaatgaaaagtcaatttgtnttgaatgtcacgtaaactaataaaggaacttatagataaattatagcgacacaataatatttttatttcatacggtataatatcatcattagtataaaattttccgaaatactcgcataaactgctaatataatgaaaacaactcacgtattccgcaagggtgtccaatgcatggatcgacacatttatattgagaacacgctaaatggttggggcattcactatcgctaaagcattcgccctgaaacgaaataaaaaatttaatttaacatttgactgagt

SEQ ID NO: 670 - DNA, 500 bp, Ctenocephalides felis
  misc_feature (75)..(75): n = unknown
  misc_feature (450)..(450): n = unknown
acaacaagttcaaatcttcttgtttgtgctataattttctatattcattataatataaccttatttttttaaggnaagtgttacacattttccaatgaatcactatgtaatgtgatactctatttttacaagttgtgtgtttgttgagcaaacatcataatttttgaagagacagttaaatataaataaaaattcttcacgtttagatatcgtatgaaatcgttcgaaaaataaataacagtgataaatttttataaaagcaaattgataaaataaagtttgataaagaaaatgcaattttagctaactggactttcagtgtagtgatatcatatcatgaatttatcattaccgattgaatattttatcacaataagttttgtgcattttatttgaaaagggcttgctcgtggcttaatgattatgaccttggctttccaacaagaaggntaaggcttgatcccatttgaaaatcagatggaaatatatttctagtgata

SEQ ID NO: 671 - DNA, 332 bp, Ctenocephalides felis
  misc_feature (61)..(61): n = unknown
  misc_feature (74)..(74): n = unknown
acaaaaagatatgatttgggtcttatcattattgagaactagattattaaatttatttganccaaagtaaatcngcaatcatcttgtgatcaatttctacctctgatatttttctatgttagcattttttatcataacaaatactattaaattacccattgattattatatggtttcaaatggtttatgttataataaattacatataaaatatataatgatatatcgcgtgcaaaacaaaagttatggttaaatcgcgtgcaaactctacaagtataaacacctaattaagcaaatgttttcaattaaatgtaaaagcagttttcatatag

SEQ ID NO: 672 - DNA, 500 bp, Ctenocephalides felis
actactcatgtggtttttctcttccatccattgtctatttcgaaaccttcactatcaagaagcacgagagccttccatttattttgagagttgaccaagaattgcagtagcagccagctgcagcatatttcatagctgatgatgtttttctaatattctttgttttgcattgccggtattctctgtaaaaaaaaaattattacattaattattcaaatttatataaaaaattaccgacgaattttttaaatcatttatattatttgactgcaatactcgagtaaattaaatttgtaatgtaaattcatcactgataaaatttttaaatattatcaagcagtttaacaataacttacatatatttgatataaagtctttgattaggtagccatttactagtaattctaggatttgcatcatacatcctctgatttgcctggctttcttccacagtctcgcttgacgtgtttagttattcaagccaatccattgcccaaatg

SEQ ID NO: 673 - DNA, 500 bp, Ctenocephalides felis
  misc_feature (14)..(14): n = unknown
  misc_feature (32)..(32): n = unknown
  misc_feature (37)..(37): n = unknown
  misc_feature (80)..(80): n = unknown
  misc_feature (96)..(96): n = unknown
  misc_feature (245)..(245): n = unknown
  misc_feature (369)..(369): n = unknown
  misc_feature (478)..(478): n = unknown
actatgaagaatgnttctatataatttactgnattgnagttaactatatttaaatgctaacgtgcatttatatgttaagnttagatttattattgntaatattatatctaaaatgattcctacatataaaataaataaaactttctgttgttaaaactttagaaatgtagttattttaaatgttacattattgaattaatacaagttttatatacaatgaaatatgttttaaaattgtatattgntcattatattttcatgcgccagtaatagttgctgcaattccttcaccacaattgaagttttcttgtagttgttgcagtttgtttaccattcatcacagtagacaatcatccaaaagtagattgntaaccatttccatgaagtagaaatcaccaagttagacttcgaatgacatggcttaattctcctctgacagtatacaaatctaactccatatgatttgttcaggaccaangacgcatttaacatgcctcctc

SEQ ID NO: 674 - DNA, 296 bp, Ctenocephalides felis
acaaattttagaatgtttaaatcattaagtttgaataaattaccttaaagatgaaaatttagctaacattgtaaaagcatgttttgttgtaattttttaaataacgtattttagatatacttttcgcttcttaacaagccaaattatgaatgattctcatgtttagaaacaactaataaaaaataaactcagtgcaaacataaacattaatatagacagattaagtagatatatcccttcataaattaattgatgtcattcattattcagataacacccctagtcaataggtttgt

SEQ ID NO: 675 - DNA, 461 bp, Ctenocephalides felis
cataataatcttgcaaaagtaatatttgaaatgaactatactacaaaacgaaacagcccccacttcctagaactaactccatctgaaatcgacggaacatatcacttatcattgattagtttgttttattatatttacaaatatagacaattatttttgtatggaatgaaacgagtttacacatacgaagcaaacatgctgaatattaaaaaatattttatttaagttcattttattaatcttgctgattttgaagaaatgaatctctcacattcataatatgatttttcataaataacaacgaaatacatattgttgtttaataattatttttaaccatagaaccacatttagagtttatttataattcggcatctatgttatgtcgaaattttaacacgcagaatttaatgaaatcgtaattaactgctcgatgcctgacaatatctagcgtctcaagt

SEQ ID NO: 676 - DNA, 500 bp, Ctenocephalides felis
  misc_feature (16)..(16): n = unknown
  misc_feature (74)..(74): n = unknown
  misc_feature (255)..(255): n = unknown
  misc_feature (390)..(390): n = unknown
  misc_feature (466)..(466): n = unknown
acttcccaaaagttgncagcgaaggatcctacaagggcgacagcagctttggagattaccaaatcaagagccgnggaattttcaacgtcaccatgtatgatgtgacagtcacttggaaaatcgaaggagcaactgaagaacgcgatggagaaacttacatgcgcatcaaacacttccgtgtcagcccaaaagttggtgatatgaaaatctatgcaagtggcttataccagatgaaggactcaataacgcagccgntgccttcatgaaccaatactggcaacctgccttccaggcacttttaccatacgcagaagaacacggagaccaaatcatgacaaactttgtcaacgaaatgttcttgagaatcccattcaacaaattaatgccagntgaataaagccaaaatttaaatatgtatataaaaaacatatagtaaataagcaaaattattttgatattttttggngattccaaccaaccaaattctatgtaggttggat

SEQ ID NO: 677 - DNA, 500 bp, Ctenocephalides felis
  misc_feature (483)..(483): n = unknown
  misc_feature (489)..(489): n = unknown
acgtatactatactctatacagctgtatgtgccacacaccaataatgtatcaatatgatacaaagaaccgatttgtaacatttttgtagggcctttccatgacgtcacgcacatgcattgaatgttttttttgttcatttagaatagttaggaaggtagccaaaaactcgaatccaaatatttatacgtatcccttttttttagtttgaattttgaatttgtatcaaattgatactagggacggatgcgggttaaacaaaaaagatcggattagtgatagtttcaaatttagcatggaatcattcggattatttcctactattaaagaccctacgagaataactaactcttcctcatattgtattgataattttttcacaaatatatctacggtaaattcatgtgtaattaataccggtctttctgaccattatggaatttcgctctctttgcctaatactactaattctacttcccatgtgnatcggnatataaaagaa

SEQ ID NO: 678 - DNA, 475 bp, Ctenocephalides felis
  misc_feature (53)..(53): n = unknown
  misc_feature (441)..(441): n = unknown
  misc_feature (475)..(475): n = unknown
acactatgatcagctcaaaaaataacttgaacgcatatgataaactaaaccgnactcaaaattttaattaattaattatagattattgggtagatctttatctataatttaataaaatacaacttatatttctgaaagcatagcactgaataattatctgacaatgcgttacccatgtagatattttactaatgggaacaatttaaatatttttaatttcaaaattagtaatgcaaatatttgcatgttttgtgtttatttttaatttgcgggattaataatcctggcagttatttagacaataatgctcaaaaaatatctaaattacaacttgtttcattttttttttaaacacatctctacataaattaaatacgtaaaatataaattacatattacgaatatattttgtataaaaccgacacgccactgatggcatgntggtaattcatgacattaaaatgcaccccggggn

SEQ ID NO: 679 - DNA, 500 bp, Ctenocephalides felis
  misc_feature (7)..(7): n = unknown
  misc_feature (37)..(37): n = unknown
  misc_feature (48)..(48): n = unknown
  misc_feature (58)..(58): n = unknown
  misc_feature (65)..(66): n = unknown
  misc_feature (71)..(71): n = unknown
  misc_feature (128)..(128): n = unknown
  misc_feature (199)..(200): n = unknown
  misc_feature (325)..(325): n = unknown
  misc_feature (408)..(408): n = unknown
  misc_feature (417)..(417): n = unknown
  misc_feature (434)..(434): n = unknown
acaaagntattaacataattggtttaacaaataattntaaatatgatnattaaacagngcagggnngcagntaaaattatgccaagtgaatggtaatttcgagttcataaaatttaataaatgatgcngtcatatttgaagcatgtatgaaataaaaggcctttagagtaaatacaaatatcaaactttctatataggnnacaaaattgaaattaaatattcaaggaatatttctactcctagtagatgcgtcattttaacaaaataaaaaacattattaattaataaccataataatttaaaccattattctgatatcctaggntgcattgcaatgtcaaagctcttatcgctgatccccgagaaagctctttaatatacatatgagcttgatttctccctttgcgntttataagnaaatttcaaagatttgnttcgatattattaacatttgcaatatttatatttgatcacaaattagtgctaaaggtgaaattatt

SEQ ID NO: 680 - DNA, 475 bp, Ctenocephalides felis
  misc_feature (61)..(61): n = unknown
cagcatattttatacgcaatgttacttaaaaaaatgttacatttttatataagaagaaatnaacattattatttattagtctgatttcatttatcttaatacgatattcctttaaaaagaaataattattaattttaatgacaaatcaagataatattttgacacttgtttatacaagaaatcgacttaagatgacatttattttcagggattatgagatttaaaatttatatggttccgaaaaactcagactcaagaaacattagtgtaaattgaagtgattgcaaaaaaattaaaattgaaaatctttgaattctgatattttggcataccttaggaaaaattgatgtatgtgtgtgtatgtttgtatgcatacgcggatacaactgttcgttgacgattcgcacggatcaaccaattttaattggcggcaaaaacgattagacatttgcacatcgagattttaataatatgt

SEQ ID NO: 681 - DNA, 387 bp, Ctenocephalides felis
  misc_feature (352)..(352): n = unknown
acacaaaatatgacgagacacgactttaataaaaacatattttgtgcacatatttttattcaaagatttattttgaagtcattgttaatgagagtaattgatagtgaagattttagcttcttcataaaatcagataaaaccggtaaaatgaagtatcaagaattgaagaaatttttgtaattggcaaattcaaactatgcactcaaattttgtatttaaaaataaggcggcatcaaaatgtaattaaaaatttcataaatgtttgtaacatgagtgcattttccacagaatgtcccatacaaaaccggcatcacaaaaaagacatgtaagacataactaacataaaataccnttttctatgagacatcctcataactctcaactcaa

SEQ ID NO: 682 - DNA, 500 bp, Ctenocephalides felis
  misc_feature (1)..(1): n = unknown
  misc_feature (28)..(28): n = unknown
  misc_feature (30)..(30): n = unknown
  misc_feature (75)..(75): n = unknown
  misc_feature (123)..(123): n = unknown
  misc_feature (133)..(133): n = unknown
  misc_feature (336)..(336): n = unknown
  misc_feature (439)..(439): n = unknown
  misc_feature (475)..(475): n = unknown
ncctattaatgttaaaagaataataatnangggtgagttttaccgatgggtggagaaagtgtataaatcgttttngccgatggatttggttaataaaaagaaaactgcaccacctgccacgtntttataatanttctataatctgcaataaaaatcatctgccatgaaatatgctccaaaataaaaaacgagtatatcgtgaaaaaatattttgaaagttataacaaatgcgttgcactttctagtttgattagttcatgtaaaaaataattattcacggcatttcaatacatgctcccaatatatttcaaattattcacccaaataagaaacacnatcgtgacaattgccaaaccattttagataaaatatgtaaatatatcaaatgatcattatatgtcttaacaaagtttataagttatcaataaataagaatgantttatattattatatctataaataagtagacgtgtntatccaccaatgaatttcaattatt

SEQ ID NO: 683 - DNA, 500 bp, Ctenocephalides felis
acttcccgtaacgtaattaaaaattcgaggaatattacatgttttcaagtagattattataaatactgtaacttatatatgatcacggaaaagtaaataaacaaaattaatcaatcgaatttaaatctgaggacattgtataatatttataagaattatataaactgaagtgcgaattattttgaatattcagaacaaaatttggcaataaaaaaaatccaaaatcatttgtttcgtcaacacaagcagaaagttttctgaatcattcaaatcggatgcttagttctctcaaaaactgccattttctgcacatttagtttggtatctacaaatcggctggacctgtctttgccaaaaactaatttctttctatttctattttctgcactcttttctccgtatcaccgaaacggctggaccgacttttgcgaaaaactaatcagcacatttccctatcaataggaatcgaatgttttttgaacaattcaaattggtgatcc

SEQ ID NO: 684 - DNA, 500 bp, Ctenocephalides felis
  misc_feature (58)..(59): n = unknown
  misc_feature (94)..(94): n = unknown
  misc_feature (224)..(224): n = unknown
  misc_feature (288)..(288): n = unknown
taagttaggagatttattttgttaatgtcaggtagaagaagatagatgtatgaaaggnngtaaggcttgaacaatatcaaaaaaattgtaattngtatttttcagacaatagctaatctgtgaaaaaacattttttaactttcccgtagttaatacgatagcattcagattcattttttttcatcttcttcatcagattatttagagggatggccagatgccanttttttgagacctttaggtctttagctcaccttttacaattaaatctttatgactgtttttaanttttttttctaaattctcaaatcaatcattaataacttgcgtaaaatttatgtctcttaccaaatactctctaaaatactactacaataatttcatcttaaaaaagattgcttataaacttcgaaatttcagatatattttaaagaactatatatataattgcatatgttctgcttacgctttgagcaaataactaacatcagtaatattaa

SEQ ID NO: 685 - DNA, 343 bp, Ctenocephalides felis; identical to SEQ ID NO: 109
  misc_feature (6)..(6): n = unknown
  misc_feature (23)..(24): n = unknown
  misc_feature (58)..(58): n = unknown
  misc_feature (71)..(71): n = unknown
  misc_feature (113)..(113): n = unknown
  misc_feature (140)..(140): n = unknown
  misc_feature (165)..(165): n = unknown
  misc_feature (338)..(338): n = unknown

SEQ ID NO: 686 - DNA, 436 bp, Ctenocephalides felis
acttcgtaatgctcaattgtaaccgggtttgtattccatgttagcatagcacttgtgcttgtaacagacttaattctaagatttatcacgtcagttttaatattaggctcacttgtcgttatattaatttcagcgtaatctacaacatcactttctatacgctcggcagtatgattccataatcctatttcatttttaattctatagctatttaaaatagttttaggaatagatttagaaaaaatacgaattctgtaagtcttcaaagggtgtaaattcgataaagatattttagtatcagtaaaatattcatcccttggtttatatacagtattgcggtcgcaatcgaaacattttatgctataaacaataatttcatcattcggttttcttgaatcttttgtagcattagcatcttttggttgtccatgtgagt

SEQ ID NO: 687 - DNA, 403 bp, Ctenocephalides felis
  misc_feature (60)..(60): n = unknown
accgttcagtgcgtttataatgaatattatacagaagtagtattaagatagaattttttnccgcggaccggaataatatattaaggtaaggcaaggcataatatttataagatacacaagacattttgccttgaatattaatacatataatataaagatcactatcaaggtgaggcatattatttattaataacttattattattttaacgagtttttatgttttcgttttagggtgttatagcgaaactttttcaagttatcaagttaataatataacaatattaaggtgaagcatattaattatatttataagatacaaaataatttttttacataattatacttatcctaatttagccttattaaattttagttttttatttttagaatatttcctttgt

SEQ ID NO: 688 - DNA, 500 bp, Ctenocephalides felis
acacatctatatagtaattagatctataattataaaatttactcaattaaataattatgtaaatggtgcatattatcaagatataataggtttaaattgtgctagagattgtcggaattatactaattgaaaagtcgattactttttatttttatccaggattaaaagtaaagtttttccatagaatattcaaaaaacttttgcctcagattacccttacaaaagacatttgttaaacatatatcgtttcttccctaatttatatattaatagatcgatttataataattaataaatgcaatattggatcgagaactaacagttatagaatttttactaagtttctgttagtattttataatgtatatttcttataaattcaaactgatagtatctattatttaataaaagttgaaaaagtgactaatttgcattgtgtgtggcatactcgcaggtgcaaaataaatttagtaaaatttcaacacctgtttatatatcaa

SEQ ID NO: 689 - DNA, 450 bp, Ctenocephalides felis
actcaatataaatagaagcattattgttcaaaattaattgcactgagtgttcaaccgcgcgtcgaatttcgctctccgttctgctgatggacgctattgtggcttataattctcgtggctataataaatgattattatatagaaattcagaagagtgctccgattcgatgcgcatattactctttgagacggtccaacgcgaccctttaaagtaatgcctttcacaatagggatgcattaaactaattcgggctgaataaaatattttaacagtttgggaaaataaactactaaccgataattatctacacactatgaaatatttaaaaaaactaaatttttggcacttgtaaaatgaatgcataattgttcatttagtgcttttttatgcttaataattttgaaatctattagtaatgacatgacattgtgctttcagacaaattgctg

SEQ ID NO: 690 - DNA, 351 bp, Ctenocephalides felis
  misc_feature (333)..(333): n = unknown
acattgcccttgatgttgccgatgttgtgattgacgtggaatttgggggtcgacagagggtctattgggggtatctccaggggtttgtaaccgtctttgatagctggcaagatacttttcattgattcctttatgcattcgttcaaattggggtcgtttcttttgcaaatcttgaagaaatccggtaagggtgcttcggggtcgacgagagctttcgctcggcagagggcggtcgtcgccaaaagcacaaccatcgccgtcatttgtcccattgtaaataaataattattatgaatagtttcacggcaaatcgtaatctcaattagcaatacnatctgcttcctggttgct

SEQ ID NO: 691 - DNA, 500 bp, Ctenocephalides felis
  misc_feature (479)..(479): n = unknown
accaaaacctagataacataatttatcacgaataaatttaataaaatataaatataaataaaacaatacaatacaaatatttaattaatgcatttaattatatttagtcttatttgtaatgaaattaggaaatttttattatactctacggaaaggtaattaccctatgagaagttaaactcctcgagttcttcgaactttaccacacaaacttcatatcttatgtttgttcaaaaactactatttcgcaataaaaatcattttaaaaagaagccaaaaacccaactccaattcgttgtttcaaaggtgtcgaaattatagtaatttattcgccgcgtgtggcacaaaactaagttttaaaaaaataaaacagattcttccatataaaaattggtctggataatgacgggcgccgatcttcctcttggtaataaaatcttggtgaacttttgccaagaaagtcaataaaacgccaattnttttcattcgtatcattatta

SEQ ID NO: 692 - DNA, 500 bp, Ctenocephalides felis
  misc_feature (483)..(483): n = unknown
acacaatggcaagtaattcttatacataatcagttttcatatatttacaatttcgtatattgatagttatagatattttagttaattcaatccttttcagttaaaaatcaaatgaactagtttattttagatcacatattttacaatatcacattcatttttttatgtttttcaaaactacactcataaaattataaacattcataaaattgctagaataaaaattgttaaatatgtagataaatcctcgtttctaatttttacatcttgattaaaataaaaatagttagttcacaattatttgtaaatggaattaaaataattctaataacagaataaaaactttaggctaatataagtcagtttacaataaaagttaaaatgttatgttgctatattatattatatatattacatcgcataccataactacatttaaacacaaagtattataatacttagtattaatgaatactaaagtgnattatgcataatatatt

SEQ ID NO: 693 - DNA, 500 bp, Ctenocephalides felis
  misc_feature (40)..(43): n = unknown
  misc_feature (449)..(449): n = unknown
  misc_feature (496)..(496): n = unknown
aatctttggttttcatggtaatatatctaggtgaaaattnnnngcaacttttagacaatttttaattgacattgctaattaattaaataaataaaaatgacttaaagttatattaataattaataattacacaaaatagcgtattgagtcttcttctgatataactttccaaggactacaatattacatcctaggatatgataaaaatcagtgatgataaaatggttgtttgatcaggaatcatagttttgttttacattttcaagacattaaggtgggtgctagaatagtaataataatccatagcagaaaataaaaattatacaaatttcttttagttcttcttatgagtcttcaaatagaaaccaatttatcaaaaccaaatttttcaattttcgtgtttacacaccgtatgagaagtgacggtaagtggtcctcaggaagacgtncagaagtagtggagctgtagctggatctgtagctcctggtcatctcnagtc

SEQ ID NO: 694 - DNA, 434 bp, Ctenocephalides felis
  misc_feature (8)..(8): n = unknown
  misc_feature (16)..(16): n = unknown
  misc_feature (24)..(25): n = unknown
  misc_feature (55)..(55): n = unknown
  misc_feature (59)..(59): n = unknown
  misc_feature (61)..(62): n = unknown
  misc_feature (65)..(66): n = unknown
  misc_feature (124)..(124): n = unknown
  misc_feature (131)..(131): n = unknown
  misc_feature (150)..(150): n = unknown
  misc_feature (152)..(153): n = unknown
  misc_feature (168)..(168): n = unknown
  misc_feature (199)..(199): n = unknown
  misc_feature (199)..(200): n = unknown
  misc_feature (222)..(222): n = unknown
  misc_feature (226)..(226): n = unknown
  misc_feature (240)..(240): n = unknown
  misc_feature (262)..(262): n = unknown
  misc_feature (272)..(272): n = unknown
  misc_feature (287)..(287): n = unknown
  misc_feature (331)..(331): n = unknown
  misc_feature (340)..(340): n = unknown
  misc_feature (351)..(351): n = unknown
  misc_feature (359)..(359): n = unknown
  misc_feature (363)..(363): n = unknown
  misc_feature (392)..(392): n = unknown
tgaataantactagtnaaacttannttttcgttgttaccgaataaatacctgggngagnanntanngtaattacagactcctttttatataaaaaattaaaaatttagtcgaaatttatttatnttgtganatctatacttattttatgncnnttttaaatatttatntttagaacgtttgcataattatagttaccannttggaattacttataccagaantaanttaaaaaaaaacanttcagtgccttatgcaagtggnttataagggngtttatgtaaacagnaaaatatgtgcaatatatcaaactaattatctggcgtagagaantgaacagtnttctgggcaanaattagtnaacntttgggttgatatataaaccaatagaggnttatctttttgtgtcatataggtggagactcgcttgaaaagt

SEQ ID NO: 695 - DNA, 500 bp, Ctenocephalides felis
  misc_feature (27)..(27): n = unknown
  misc_feature (118)..(118): n = unknown
  misc_feature (125)..(125): n = unknown
  misc_feature (155)..(155): n = unknown
  misc_feature (170)..(170): n = unknown
  misc_feature (185)..(185): n = unknown
  misc_feature (187)..(187): n = unknown
  misc_feature (227)..(227): n = unknown
  misc_feature (260)..(260): n = unknown
  misc_feature (359)..(359): n = unknown
  misc_feature (494)..(495): n = unknown
  misc_feature (494)..(495): n = unknown
tcttgaattataagtgatcattatganttttattattgtcaatatttggggggtataaattatgattaaccatatgatttagaattttattcctcggcgtatataaatgtatatttgngtaaatnttgaattctaatttaagaacaggttaatanttttattttattgtnttcattaaaattccntnaattccgtataagcatctttacgactttattcagcgattnttcctattttttttatcagcttataaatgtcanttcttttgaaaagtttatatgattactttgaagtgatttatcaatattttcttaaatcatcaatttttcttttgaaaatcagggctggcggaaggcggngtctgctaggtctgcaaagccttagggcattatataaatatgttgacgagtgcatataaatatgtctgaaaaaaatcactctgcgtattaattaatatggattaaataacttaataatttttaacttccgatggnnagtta

SEQ ID NO: 696 - DNA, 500 bp, Ctenocephalides felis
  misc_feature (3)..(3): n = unknown
  misc_feature (37)..(37): n = unknown
  misc_feature (43)..(43): n = unknown
  misc_feature (48)..(48): n = unknown
  misc_feature (53)..(53): n = unknown
  misc_feature (72)..(72): n = unknown
  misc_feature (75)..(75): n = unknown
  misc_feature (88)..(88): n = unknown
  misc_feature (107)..(107): n = unknown
  misc_feature (117)..(117): n = unknown
  misc_feature (144)..(144): n = unknown
  misc_feature (284)..(284): n = unknown
  misc_feature (293)..(293): n = unknown
  misc_feature (309)..(309): n = unknown
  misc_feature (315)..(315): n = unknown
  misc_feature (467)..(467): n = unknown
tanttcttatacataattagttttcatatatttacantttcgnatggnggggngttatagatattttagttnatncaatcctttcagntaaaaatcaaatgaactantttattttanatcacatattttacaatatcacattcntttctttatgtttttcaaaactacactcataaaattataaacattcataaaattgctagaataaaaattgttaaatatgtagataaatcctcgtttctaatttttacatcttgattaaaataaaaatagttagttcacanttatttgtnaatggaattaaaatanttctantaacagaataaaaactttaggctaatataagtcagcttacaataaaagttaaaatgttatgttgctatattatattatatatattacatcgcataccataactacatttaaacacaaagtatataatacttagtattaatgaatactaaagngtattatgcataatatatttttaatataaaaat

SEQ ID NO: 697 - DNA, 454 bp, Ctenocephalides felis
  misc_feature (31)..(31): n = unknown
  misc_feature (33)..(33): n = unknown
  misc_feature (45)..(45): n = unknown
  misc_feature (62)..(62): n = unknown
  misc_feature (66)..(66): n = unknown
  misc_feature (79)..(79): n = unknown
  misc_feature (195)..(195): n = unknown
  misc_feature (201)..(201): n = unknown
  misc_feature (211)..(211): n = unknown
  misc_feature (228)..(228): n = unknown
  misc_feature (248)..(248): n = unknown
  misc_feature (288)..(288): n = unknown
  misc_feature (378)..(378): n = unknown
acataattcttaaataataaaatgtgttttntnttttaaaccaanaaaaattttgggggggntttntataaaaaaaatnacacttattttttatttattatttcaataattaattaattaataatataccaataatatttatattttatcagaaattaaataatttaattaaatattgactataatctagatgtnataaancaaaattacnctttacaaagtcaattntttaaaattgaaaaattttnatttcctagtaataaaatataaaatcgtagaaataaatgnttgatagtggatcatattggataatatatgctcattatattttattatatatgtgggctctttaggcaaattaaaattctgcggcaaaancatattcatccagcaattcgcgagtttagaacataatattagaaattatatataacatttttaattcattcattgt

SEQ ID NO: 698 - DNA, 500 bp, Ctenocephalides felis
  misc_feature (6)..(6): n = unknown
  misc_feature (16)..(16): n = unknown
  misc_feature (24)..(24): n = unknown
  misc_feature (27)..(27): n = unknown
  misc_feature (40)..(40): n = unknown
  misc_feature (43)..(43): n = unknown
  misc_feature (45)..(45): n = unknown
  misc_feature (53)..(53): n = unknown
  misc_feature (63)..(63): n = unknown
  misc_feature (67)..(67): n = unknown
  misc_feature (72)..(72): n = unknown
  misc_feature (75)..(75): n = unknown
  misc_feature (81)..(81): n = unknown
  misc_feature (88)..(89): n = unknown
  misc_feature (100)..(100): n = unknown
  misc_feature (106)..(106): n = unknown
  misc_feature (108)..(108): n = unknown
  misc_feature (127)..(127): n = unknown
  misc_feature (133)..(133): n = unknown
  misc_feature (142)..(142): n = unknown
  misc_feature (146)..(147): n = unknown
  misc_feature (155)..(155): n = unknown
  misc_feature (160)..(161): n = unknown
  misc_feature (168)..(168): n = unknown
  misc_feature (175)..(175): n = unknown
  misc_feature (180)..(180): n = unknown
  misc_feature (186)..(186): n = unknown
  misc_feature (188)..(188): n = unknown
  misc_feature (190)..(190): n = unknown
  misc_feature (192)..(192): n = unknown
  misc_feature (197)..(197): n = unknown
  misc_feature (201)..(201): n = unknown
  misc_feature (205)..(205): n = unknown
  misc_feature (211)..(212): n = unknown
  misc_feature (224)..(225): n = unknown
  misc_feature (227)..(227): n = unknown
  misc_feature (231)..(231): n = unknown
  misc_feature (233)..(233): n = unknown
  misc_feature (236)..(236): n = unknown
  misc_feature (252)..(252): n = unknown
  misc_feature (260)..(260): n = unknown
  misc_feature (262)..(262): n = unknown
  misc_feature (286)..(286): n = unknown
  misc_feature (289)..(292): n = unknown
  misc_feature (295)..(295): n = unknown
  misc_feature (300)..(301): n = unknown
  misc_feature (305)..(306): n = unknown
  misc_feature (308)..(309): n = unknown
  misc_feature (311)..(311): n = unknown
  misc_feature (313)..(313): n = unknown
  misc_feature (322)..(322): n = unknown
  misc_feature (337)..(337): n = unknown
  misc_feature (339)..(339): n = unknown
  misc_feature (346)..(346): n = unknown
  misc_feature (352)..(352): n = unknown
  misc_feature (356)..(357): n = unknown
  misc_feature (361)..(361): n = unknown
  misc_feature (363)..(365): n = unknown
  misc_feature (372)..(372): n = unknown
  misc_feature (378)..(378): n = unknown
  misc_feature (382)..(382): n = unknown
  misc_feature (388)..(388): n = unknown
  misc_feature (393)..(393): n = unknown
  misc_feature (406)..(409): n = unknown
  misc_feature (413)..(413): n = unknown
  misc_feature (421)..(421): n = unknown
  misc_feature (426)..(426): n = unknown
  misc_feature (428)..(428): n = unknown
  misc_feature (433)..(433): n = unknown
  misc_feature (438)..(438): n = unknown
  misc_feature (442)..(442): n = unknown
  misc_feature (442)..(444): n = unknown
  misc_feature (449)..(449): n = unknown
  misc_feature (462)..(462): n = unknown
  misc_feature (467)..(468): n = unknown
  misc_feature (470)..(470): n = unknown
  misc_feature (473)..(473): n = unknown
  misc_feature (479)..(479): n = unknown
  misc_feature (481)..(481): n = unknown
  misc_feature (487)..(487): n = unknown
  misc_feature (489)..(490): n = unknown
  misc_feature (492)..(492): n = unknown
gggggntgacaatggngtgtaaanaanagcatgtatatanagntnactaattngatctatagngagnggggnggngaaatntactggnnagtcgccttanaacgtngngactgggaaaaattctggngttacncaatttaanagcnntggagcanaattnnacttttnatcagcntgggnaaatancngnanaggtnccgnattnatatgnnccttcccaatanntngcgnanatnttgattggtgaaatgngatgtgtntntgtagcaggctcattaagcagcgngannnngtngtggnnattnntnnantnggatactcnttatactttgaaaanantccttanagcatnggtnntaanannnttctttnattatntttnaaggtnaaggnttaaaaagcttannnncgtntatgtttnaaaanantttgntttcnttannngagantaatttatgagtnttatnngnttntagatntnttaaananntnaattatgg

SEQ ID NO: 699 - DNA, 436 bp, Ctenocephalides felis
  misc_feature (10)..(10): n = unknown
  misc_feature (24)..(24): n = unknown
  misc_feature (41)..(41): n = unknown
  misc_feature (45)..(45): n = unknown
  misc_feature (51)..(51): n = unknown
  misc_feature (55)..(55): n = unknown
  misc_feature (113)..(113): n = unknown
  misc_feature (189)..(189): n = unknown
  misc_feature (195)..(195): n = unknown
  misc_feature (252)..(252): n = unknown
  misc_feature (257)..(257): n = unknown
  misc_feature (349)..(349): n = unknown
attatatatntgcatgttaatttnaaataacctgtctgcanttgnaaattngggnggtttttcgttttaaatggatagttatttttgttactcaaatgttttatggagaattnctttttttggatatgtcgctttatcaatggcatattggaaaaaaatttaaaatcacttatgtttagagaagaactnagaaanaaaaatattatgttaaacagcttctctgaagtgggatataaatttttcaaaagcatngctgnttattgaaacagaagtatcctatgactatgttgcaagggattcagttaattaaactcaggtcaaggaatacgagagtctgaagatcaatttngaaaaattgggcaaaataaaaatatttcaaaagctagtagaaacatctggaagataatagaaacgagctgaataagcactgcatagt

SEQ ID NO: 700 - DNA, 225 bp, Ctenocephalides felis
  misc_feature (48)..(48): n = unknown
  misc_feature (174)..(174): n = unknown
cttatttactgcagcataccatacgttgaagatttatattattagttntgccaaaattttgttagaagaaaacattttagtatcaggctcatccctacactccttcaaccaattctttacgaacattaaatcccccaccccatccaatctcaatactaatgtagtatattctgnttcttgtaatgactgtgcttttcaatatattggacaaacctcccaatatgt

SEQ ID NO: 701 - DNA, 500 bp, Ctenocephalides felis
  misc_feature (1)..(1): n = unknown
  misc_feature (33)..(33): n = unknown
  misc_feature (87)..(87): n = unknown
  misc_feature (111)..(111): n = unknown
  misc_feature (122)..(122): n = unknown
  misc_feature (136)..(136): n = unknown
  misc_feature (154)..(154): n = unknown
  misc_feature (187)..(187): n = unknown
  misc_feature (208)..(209): n = unknown
  misc_feature (215)..(215): n = unknown
  misc_feature (323)..(323): n = unknown
  misc_feature (327)..(327): n = unknown
  misc_feature (337)..(337): n = unknown
  misc_feature (356)..(356): n = unknown
  misc_feature (364)..(364): n = unknown
  misc_feature (379)..(379): n = unknown
  misc_feature (388)..(388): n = unknown
  misc_feature (420)..(420): n = unknown
  misc_feature (441)..(441): n = unknown
  misc_feature (449)..(449): n = unknown
ngctaaatgtgcaaaaatgacagagagaactangctgtccgatttgaatgattcaaagaagggggggggcttgtttcaacaaaatanttgctcttggaaaaaaaattaaantttttattttnaaaaaaaatttttntttgtatatcgaaaatanttcagattttaattttgatttttggctaaagcntttaaagctcactaatatacnntttttnatacctttattcattatattgtcaatcaagacttataaagtcttataatacaaaactgcttgcttagataataataagaacaataaaataaagtaaacaaagcacgtnatangtagtagtanttaagaaaccaaacgaaanttataaantgaagtaaaaaatanaaatataantgaaaaaagacgaatatactttaaataaatanattataactttgcgattaaanttaaatanttcttatatatattaaacaatggtacagtatttatagtaatctatttaaaa

SEQ ID NO: 702 - DNA, 494 bp, Ctenocephalides felis
  misc_feature (61)..(61): n = unknown
  misc_feature (433)..(433): n = unknown
  misc_feature (458)..(458): n = unknown
  misc_feature (464)..(464): n = unknown
catggcatcgtgccctaatgcaaattgctggaacttcacgcaccgtaattaaaaggggggngaaataaaaataatcaataactgttttaaataatttcagaaagatcatcttctacatatataaaaataagtcgggttttccttcctatcgaaataactccagaacgcacgaaccgatttcgacaatttaatatttcgctggaaaggtaacaggctccgcaaggtttatagctaagaaaattagttgtgcatggcatcgtgctttaatgcaagctgctggaactcccgcaccgtaattaaaaattcgagtaataaaaataatcaataactgttttaaataatttcagaaagattatcttctacatatataaaaataagtcgggttttccttcctgacgaaataactccagaacgcacgaaccgatttcgacanttttgtattccgttggaaaggtctncggctncgcaggcttatagctaagaaaattagttgt

SEQ ID NO: 703 - DNA, 499 bp, Ctenocephalides felis
  misc_feature (20)..(20): n = unknown
  misc_feature (49)..(49): n = unknown
  misc_feature (52)..(52): n = unknown
caataaagaattggatttanattatttacaaggtcattttctctattcnggngtttgtatgactccccgtaaacaagatcaagacctcctccgcaggtatatcatgtattgaagagaacgtcctcaacattctcgcagcatctttagttgagactagagaaaatgcaatatcagaaataagacatttattgtaattaaaatttattaaaatctatagcatacaaagtattaaaattaaaaaagtttgaccagcaatggcatacacattacataataaaattgcgttaaaactgacaatcaaattaaatcaattattcattagcggagatgaagaactccacctttttaggtttgaaaacttcaacacgaaatttgacgagaccagtaaagaattcagactggaaatttgtttcagtcaaacagattttgtagttggcagcattttcaatttcgtctcatcatccaagaaatctccattttggaagcacctgtgttgtaa

SEQ ID NO: 704 - DNA, 376 bp, Ctenocephalides felis
  misc_feature (55)..(55): n = unknown
  misc_feature (192)..(192): n = unknown
aagtattgacgaagttaagcacaaattactcaaaaatttgttaagaaacatattngtttgtaattttattccaaaagtatatacactggagaatataatttcaaaattataattgtttatcctgcatagtaagtcctgacgagctcccaaaatatgacgattaatatattacttaaattaaatatacatcgngctgtcggcaaagttaagtacaaattactcgaaaatttgttaagaaacatatttttttgtaattttattttgaaagtacacacaatgaaaaagataatatcaaaactgtaattatttagtctacccgggacgccctgaagagctcctcaaaattcacaagtgcaatataacataaattaatagt

SEQ ID NO: 705 - DNA, 118 bp, Ctenocephalides felis
  misc_feature (47)..(47): n = unknown
ttctgtataagtaatttggttgtaataatgttcagtgttaacgaacngggtgagctgcatgagcaatgctctacccaactgtaaaactctaaatgttgttaattcgaactacgactgt

SEQ ID NO: 706 - DNA, 289 bp, Ctenocephalides felis
  misc_feature (6)..(6): n = unknown
  misc_feature (36)..(36): n = unknown
  misc_feature (46)..(46): n = unknown
  misc_feature (80)..(80): n = unknown
  misc_feature (82)..(82): n = unknown
  misc_feature (115)..(115): n = unknown
  misc_feature (174)..(174): n = unknown
  misc_feature (200)..(200): n = unknown
  misc_feature (260)..(260): n = unknown
taaagnttagtttagatttaaattcatttaacttgnatttcaatgntattattattgcaaaataaattcttcaataatgnanatcaacaaatttcctttgtgttacaaaatttgnatgtattttttaactataataagtcttcaatatttccaaagcagtatgttctacaatgnaagtaatttaaaataagtattggtgnaaaattaaaataaatgaaataattaaacaataaatgctttatttttaattaggaaatcanatcaccagtatcatctctaagaaaaatgt

SEQ ID NO: 707 - DNA, 202 bp, Ctenocephalides felis
aaataatatgcgctcgaattgaaagaaatgcccgcgctcgtccgggatttgaacccgggacctcccgcaccataaccggaaatcatacccctaaaccaacttttggatttgccacttacgtttaatatctaagccgaaatcataaccctagaccaacaagccacgagttttatccagtgcatgtttgtgttggaaccaatgt

SEQ ID NO: 708 - DNA, 300 bp, Ctenocephalides felis
  misc_feature (35)..(35): n = unknown
  misc_feature (44)..(44): n = unknown
  misc_feature (48)..(48): n = unknown
  misc_feature (50)..(50): n = unknown
  misc_feature (123)..(123): n = unknown
  misc_feature (146)..(146): n = unknown
ttggtatagcctttccagaattactcatatactgngaaatacgngacngntgtaaacttcttgcaacaaagcatatatggaaatatgttttctctttaaatgactctttaaattggcgtttgntgaactatactttatctgctggntgcatactagttgattttcaactagttggttcaatgcccatcactagttaaaatcatttatgatattgaaaaagattaaaagttgattatactaaattattatatagccctcggctattttcgtgaatatttagtgagtaaaagcagcaaaagt

SEQ ID NO: 709 - DNA, 500 bp, Ctenocephalides felis
  misc_feature (29)..(29): n = unknown
  misc_feature (31)..(31): n = unknown
  misc_feature (48)..(48): n = unknown
  misc_feature (58)..(58): n = unknown
  misc_feature (65)..(65): n = unknown
  misc_feature (93)..(93): n = unknown
  misc_feature (396)..(396): n = unknown
  misc_feature (428)..(428): n = unknown
  misc_feature (475)..(475): n = unknown
acattgatactactttgacatgtcggaantnttttctcagtttgttgntcttttgatnggggggngtcacaatatttacttattaaataattntgcgctatatctaaatgtatctttaaaattaatattttgcaaattagcaataactatcaatgagtagatctgctcatagtaagtagtatatatttttatatcgaatgttagtgtaaatgaccgttttaaatttacagttctagaatattaaacgagctttgtgaacaagggtgaaagatcaaaataacatcactttttaaactgtaacgttgacaatattatgttgaaatgatcaaattacataaatgagtcagcaaaatttgttgctaatattttgctcggatttttttgaagaatctagtntatatttggtatatatagatatatagatgtgncgtatacctatatgtgcgtgcgtgtgtgccaaattaacaatatattngccaaagatatgtatatgccagtct

SEQ ID NO: 710 - DNA, 425 bp, Ctenocephalides felis
  misc_feature (50)..(50): n = unknown
  misc_feature (63)..(63): n = unknown
  misc_feature (66)..(66): n = unknown
  misc_feature (81)..(81): n = unknown
  misc_feature (89)..(89): n = unknown
  misc_feature (116)..(116): n = unknown
accaaaatatggttaattattatatattaaattttttttagttaaatagnttttgtatgcggnggnaaacatgctttgttnggaatgcnaaaatagtgaacacaaagcttcattcngcaaacaaatagaagttgtgtattgacatatcttgatttcatcttaccatttacttaaatgttcataataatatttgcaagatacatagcgaaaaaaatcattagctatagcacaattttcataagttgttaattcatgttatttttattagaattcaaattttatcataataacacgattaaataaaataagcacaatgattttatcatgtataccaaaatgtcgcttgaaggtaatatctacatcttaaactagaaaccctcattaaaaatataataattagatttagtatttgttgaaatagtagt

SEQ ID NO: 711 - DNA, 500 bp, Ctenocephalides felis
  misc_feature (29)..(29): n = unknown
  misc_feature (57)..(57): n = unknown
  misc_feature (62)..(62): n = unknown
  misc_feature (484)..(484): n = unknown
  misc_feature (493)..(493): n = unknown
cttcgtttaccaaaaaatcgctaattttntttttacaaacgtcaaaaaactactcanggggntcaaactttcataaattttcaaaactaaactacttgtcgtaaggccgtaatatttcagtaagttctataagaccatgatatataaagccaaaaaagtatcatcggcttaaattttttttcaacagttaattacaagaaaacaattacatgaaatctttaagcgctcataacttttgaacgatttattataggatattgatgttcccaggtgaaatattctaaatcaaaagatctttaatccagtataaaaagttttaagatacctcttatcgttcgcgagatatacgccaaaaacggtttcaaatttttaagtttgaattagttaaacggctatagctcgaaaaatattcatgacgtatatgaatgaaatatgcgtatttaaaatatgtatctgatggtgcaaaaagtttgtaatagctctnccgttccgnatatttt

SEQ ID NO: 712 - DNA, 499 bp, Ctenocephalides felis
  misc_feature (29)..(29): n = unknown
  misc_feature (55)..(57): n = unknown
  misc_feature (59)..(59): n = unknown
  misc_feature (61)..(61): n = unknown
  misc_feature (77)..(79): n = unknown
  misc_feature (134)..(134): n = unknown
  misc_feature (142)..(142): n = unknown
  misc_feature (198)..(198): n = unknown
  misc_feature (223)..(223): n = unknown
  misc_feature (229)..(229): n = unknown
  misc_feature (241)..(241): n = unknown
  misc_feature (266)..(266): n = unknown
  misc_feature (289)..(289): n = unknown
  misc_feature (296)..(296): n = unknown
  misc_feature (315)..(315): n = unknown
  misc_feature (328)..(328): n = unknown
  misc_feature (336)..(336): n = unknown
  misc_feature (384)..(384): n = unknown
  misc_feature (411)..(411): n = unknown
  misc_feature (418)..(418): n = unknown
  misc_feature (433)..(433): n = unknown
  misc_feature (455)..(455): n = unknown
  misc_feature (457)..(457): n = unknown
  misc_feature (464)..(464): n = unknown
  misc_feature (467)..(467): n = unknown
  misc_feature (480)..(480): n = unknown
  misc_feature (488)..(488): n = unknown
ctttgcttcaaatatcgaagacatatttntgaagaaaatcttggcacacattgannngncnctgcacctcgcatgannntcacttgaatactcttgatgaaagagtgagaaatagaaataatcttcttgcaaangttcactngcatggagaaacctgaaatgcagtttatagaaatatattccacgcagtgaaaccanttgcacggactaataaacgcaacgntttcanttacgaccgcanttcacaaaaaaccggcgcttaaaantatactaactatttatatgcctnggaacgntctcgctttaagtgcgaancggcatttatcanttggggcncttaaatgaaatcttaatccaggataagggtcactaattacgcatggnaacaaaacagcaaatcggtgacgagcntaataanttaaaaaaaaacatnacaacccccggtatatgttaancnaaaaatntanaaaagcctgaaanttgggganaaattaaaacc

SEQ ID NO: 713 - DNA, 500 bp, Ctenocephalides felis
  misc_feature (1)..(1): n = unknown
  misc_feature (22)..(22): n = unknown
  misc_feature (29)..(30): n = unknown
  misc_feature (34)..(34): n = unknown
  misc_feature (43)..(43): n = unknown
  misc_feature (58)..(58): n = unknown
  misc_feature (63)..(63): n = unknown
  misc_feature (65)..(66): n = unknown
  misc_feature (69)..(69): n = unknown
  misc_feature (73)..(73): n = unknown
  misc_feature (81)..(81): n = unknown
  misc_feature (105)..(105): n = unknown
  misc_feature (127)..(127): n = unknown
  misc_feature (137)..(138): n = unknown
  misc_feature (146)..(146): n = unknown
  misc_feature (189)..(189): n = unknown
  misc_feature (194)..(194): n = unknown
  misc_feature (273)..(273): n = unknown
  misc_feature (342)..(343): n = unknown
  misc_feature (348)..(348): n = unknown
  misc_feature (361)..(361): n = unknown
  misc_feature (387)..(388): n = unknown
  misc_feature (391)..(392): n = unknown
  misc_feature (415)..(415): n = unknown
  misc_feature (437)..(438): n = unknown
  misc_feature (458)..(459): n = unknown
  misc_feature (462)..(462): n = unknown
  misc_feature (468)..(468): n = unknown
  misc_feature (473)..(473): n = unknown
  misc_feature (484)..(484): n = unknown
ntattggcttagaaagaggaanttaaatnntttnattactaantatatcaattaaganggggngnnagnaggngtggtagnaataaacattataatcaaggcgtnttgaattaaaagctcatattgntagaatgtannaacgcgcnataccttttctttttttagacaaaaatttataacgtaatatanttatnttaaaaatgcaaaaaatatttaaagcgaaaaataaacaactaacttcatatacatatatgtatatataaggatcttgcnagggcaaaataataaagattctgcaataacaagcatagcttctgttcaataaccgcattataaatgccnntttgntatttattacgcnatattagcaaaaatcactatgtgcgnnaanntttcttaaataattaactggcgngcttgcttaatatctataatanntttaacatcaacaataatgnntanttactnaaganttctaaaacanttattagaatattcgt

SEQ ID NO: 714 - DNA, 500 bp, Ctenocephalides felis
  misc_feature (41)..(41): n = unknown
  misc_feature (63)..(64): n = unknown
  misc_feature (92)..(92): n = unknown
  misc_feature (94)..(94): n = unknown
  misc_feature (109)..(110): n = unknown
  misc_feature (141)..(141): n = unknown
  misc_feature (146)..(146): n = unknown
  misc_feature (152)..(152): n = unknown
  misc_feature (224)..(224): n = unknown
  misc_feature (226)..(226): n = unknown
  misc_feature (243)..(243): n = unknown
  misc_feature (255)..(255): n = unknown
  misc_feature (283)..(283): n = unknown
  misc_feature (347)..(347): n = unknown
  misc_feature (383)..(383): n = unknown
  misc_feature (427)..(427): n = unknown
  misc_feature (469)..(469): n = unknown
  misc_feature (471)..(471): n = unknown
  misc_feature (474)..(474): n = unknown
  misc_feature (489)..(489): n = unknown
  misc_feature (495)..(495): n = unknown
acgaattacatttttgttatgtgtagaaaggtgtcaaacanttcatctcttgatcagaaatannttttctttctagtaaatggatccaaaangngctaagaaagaagannttcctgagattataaattctctgaaaaaaanatacntttccnttatttatataatataaattatttagatatatgggatgacttctagaaaaaattaaagtggtcaggaatggngncattgaaagaaatcttnctatcggtatgntaattacatcaaagattaaacataactncttaactaattcatactcctatcaaaatatcttttagggatcgatatactggctcttttctacngacatggttatcttggaaattgatggaagtaaaganatggatctaaataatatgggcctcggccgggacaccctaaccgnatctgagatatcaatacctggcggcggtcgagcatgcattananggnccaatcgcctatagngggcgnataca

SEQ ID NO: 715 - DNA, 500 bp, Ctenocephalides felis
  misc_feature (22)..(22): n = unknown
  misc_feature (45)..(45): n = unknown
  misc_feature (49)..(49): n = unknown
  misc_feature (63)..(63): n = unknown
  misc_feature (109)..(109): n = unknown
  misc_feature (112)..(112): n = unknown
  misc_feature (153)..(153): n = unknown
  misc_feature (164)..(164): n = unknown
  misc_feature (175)..(175): n = unknown
  misc_feature (220)..(220): n = unknown
  misc_feature (230)..(230): n = unknown
  misc_feature (234)..(234): n = unknown
  misc_feature (324)..(324): n = unknown
  misc_feature (343)..(343): n = unknown
  misc_feature (434)..(434): n = unknown
  misc_feature (461)..(461): n = unknown
  misc_feature (466)..(466): n = unknown
  misc_feature (475)..(475): n = unknown
  misc_feature (484)..(484): n = unknown
  misc_feature (495)..(495): n = unknown
  misc_feature (497)..(498): n = unknown
actcattttatatattctcggngggataaaaatataattaattantgtnggccttctacgggngtgcttttagaaaaaccaaaatctggtgggggggctttttgacccnccnttttgaggctttaaatttaattctttattattatggaaaanataggtggttnaaatcatgggnttagacaacatcggcggttcatttaagtatattatacattttggnccatcgcacngatncagtgattaaaaaatacagtcacgctttacaattaaatatcgcgaggtcgctaaaaataaagccaacaaagctctacgtgaatgaaaagncgggacctgagaagccgcntttaagcttggaagcgcgctggagttactgggattggaccactacacttaaagacacattgggaatccaagtagtccccattagctaaacncttcaaaatgctactataatggtgganggtangcttggctnggcgggacnccttagcgatntnnga

SEQ ID NO: 716 - DNA, 500 bp, Ctenocephalides felis
  misc_feature (35)..(35): n = unknown
  misc_feature (59)..(59): n = unknown
  misc_feature (66)..(67): n = unknown
  misc_feature (84)..(84): n = unknown
  misc_feature (86)..(86): n = unknown
  misc_feature (144)..(146): n = unknown
  misc_feature (213)..(213): n = unknown
  misc_feature (218)..(218): n = unknown
  misc_feature (246)..(246): n = unknown
  misc_feature (295)..(295): n = unknown
  misc_feature (354)..(354): n = unknown
  misc_feature (362)..(362): n = unknown
  misc_feature (396)..(398): n = unknown
  misc_feature (428)..(428): n = unknown
  misc_feature (438)..(438): n = unknown
  misc_feature (457)..(457): n = unknown
  misc_feature (472)..(472): n = unknown
actaaatgaattacaaattatccgtatatatttanggaatattttacatatatggacangtggggnntggaagcttatttttgntnttaatattaactcttttatttacaactgtccagtaaaggacatttagtaaatttaagnnnttacaatagtccgccgagaagggacattgtatactacattgtcatgttggaaaaaacaactcagtantcgcncttcctttctatataaaattcacaatantttattattgaataattacttataaataatgattaagttatttctattntttttctcaggagagttgatagcttacatccattggcgcttaataaatgataaaaatgnataatcanttgatgaaataacttcatacaattattattacannntttaatggaagcttaatgaatgataaaaantataataaantgatgaaatacttcatacnatattattacaaccnctttatttcattctacactgggacgaac

SEQ ID NO: 717 - DNA, 363 bp, Ctenocephalides felis
  misc_feature (28)..(28): n = unknown
  misc_feature (32)..(32): n = unknown
  misc_feature (40)..(41): n = unknown
  misc_feature (47)..(47): n = unknown
  misc_feature (61)..(61): n = unknown
  misc_feature (64)..(64): n = unknown
  misc_feature (138)..(138): n = unknown
  misc_feature (144)..(144): n = unknown
  misc_feature (149)..(149): n = unknown
  misc_feature (151)..(151): n = unknown
  misc_feature (209)..(209): n = unknown
  misc_feature (234)..(234): n = unknown
  misc_feature (321)..(321): n = unknown
  misc_feature (363)..(363): n = unknown
tattatatgtattaaatgaaaccttttntttnatacctanntttagnggcaaatggggggnttngaaataaaaaggctttctataaatctatcgtaattgggtcatcatgaaaaaaaattgattccatatatactacnaccaantcgantngcaatattcacatatagctttcgatatgtccaaacaatcgaacatatataatatttanttcatatttaggtgatttaattatnggtaaaaagggtgtggcatgtttgaagagatatgtatatcgctatacaattaaatatccacattattatataaatataattttttgngcttatttatctttatcactttcagctttctttccaattggn

SEQ ID NO: 718 - DNA, 500 bp, Ctenocephalides felis
  misc_feature (3)..(3): n = unknown
  misc_feature (6)..(6): n = unknown
  misc_feature (13)..(13): n = unknown
  misc_feature (31)..(31): n = unknown
  misc_feature (35)..(35): n = unknown
  misc_feature (59)..(60): n = unknown
  misc_feature (65)..(65): n = unknown
  misc_feature (69)..(69): n = unknown
  misc_feature (72)..(74): n = unknown
  misc_feature (117)..(118): n = unknown
  misc_feature (127)..(127): n = unknown
  misc_feature (129)..(129): n = unknown
  misc_feature (136)..(136): n = unknown
  misc_feature (142)..(142): n = unknown
  misc_feature (145)..(145): n = unknown
  misc_feature (148)..(148): n = unknown
  misc_feature (152)..(152): n = unknown
  misc_feature (172)..(172): n = unknown
  misc_feature (190)..(190): n = unknown
  misc_feature (197)..(198): n = unknown
  misc_feature (222)..(222): n = unknown
  misc_feature (247)..(247): n = unknown
  misc_feature (249)..(250): n = unknown
  misc_feature (260)..(260): n = unknown
  misc_feature (262)..(262): n = unknown
  misc_feature (271)..(271): n = unknown
  misc_feature (277)..(277): n = unknown
  misc_feature (327)..(327): n = unknown
  misc_feature (336)..(336): n = unknown
  misc_feature (342)..(342): n = unknown
  misc_feature (344)..(344): n = unknown
  misc_feature (348)..(348): n = unknown
  misc_feature (366)..(366): n = unknown
  misc_feature (373)..(373): n = unknown
  misc_feature (393)..(393): n = unknown
  misc_feature (403)..(403): n = unknown
  misc_feature (423)..(423): n = unknown
  misc_feature (425)..(425): n = unknown
  misc_feature (456)..(456): n = unknown
  misc_feature (468)..(468): n = unknown
  misc_feature (483)..(483): n = unknown
  misc_feature (499)..(499): n = unknown
ggncantttattntcatttttatggataagntttntgaaataaatagtcaacagaaccnnggggngagntannncctttattgcttggaaatctatctatacaatagatttaaatannttagttccngnttataangtaacngcnggnccgncttcaaaaatatagaataanttcgataaggactagcgnttgtcanntttgcacaacaatcagccatctcngtaaatatccgaaaaggaaaaaaangnncgtctacgcntnagcccacanttctanatcgattttaaaaatacaaaaccgttcgaaagatattgggtgggaatganattgattanccttcngnaaanatctcttttattgacagnttcttgngaataactggcaaaaaaacncttgacgacnttatgaaactcctttcgaananatattataggctcaatggatatctaaaatanagggcctcacanacggttgcttaaaanttataaaggggaaaant

SEQ ID NO: 719 - DNA, 353 bp, Ctenocephalides felis
  misc_feature (27)..(27): n = unknown
  misc_feature (29)..(29): n = unknown
  misc_feature (42)..(42): n = unknown
  misc_feature (54)..(54): n = unknown
  misc_feature (56)..(57): n = unknown
  misc_feature (65)..(65): n = unknown
  misc_feature (71)..(72): n = unknown
  misc_feature (74)..(74): n = unknown
  misc_feature (119)..(119): n = unknown
  misc_feature (129)..(129): n = unknown
  misc_feature (134)..(134): n = unknown
  misc_feature (136)..(136): n = unknown
  misc_feature (141)..(142): n = unknown
  misc_feature (145)..(145): n = unknown
  misc_feature (190)..(190): n = unknown
  misc_feature (205)..(205): n = unknown
  misc_feature (221)..(221): n = unknown
  misc_feature (265)..(265): n = unknown
  misc_feature (273)..(273): n = unknown
  misc_feature (275)..(275): n = unknown
  misc_feature (279)..(279): n = unknown
  misc_feature (281)..(281): n = unknown
  misc_feature (283)..(283): n = unknown
  misc_feature (347)..(347): n = unknown
aaacagaaaaatatcaaacctttcatntntttcaatacatanttatctacaagngnngggggggngagggnngngactactacaataccatcactttttgcttttaattttattccaantacatactangagcngncttcnncgnctcaatgcctcattgaatccttcgcacaaagttaaatcagatcgnccttgtgcgcattgnaagaattgcatgattncccatgcgcaagggccagtagagttcttggccttggtaagcagnacttgcgnangcantngntgaggggcttgggcaggtgctgcttcactggaggaaccaccagagaagaaccagttataccggnttctac

SEQ ID NO: 720 - DNA, 500 bp, Ctenocephalides felis
  misc_feature (29)..(29): n = unknown
  misc_feature (50)..(50): n = unknown
  misc_feature (53)..(53): n = unknown
  misc_feature (73)..(73): n = unknown
  misc_feature (79)..(79): n = unknown
  misc_feature (92)..(92): n = unknown
  misc_feature (94)..(94): n = unknown
  misc_feature (110)..(110): n = unknown
  misc_feature (141)..(141): n = unknown
  misc_feature (146)..(146): n = unknown
  misc_feature (149)..(149): n = unknown
  misc_feature (168)..(168): n = unknown
  misc_feature (185)..(185): n = unknown
  misc_feature (187)..(187): n = unknown
  misc_feature (191)..(191): n = unknown
  misc_feature (193)..(193): n = unknown
  misc_feature (223)..(223): n = unknown
  misc_feature (244)..(244): n = unknown
  misc_feature (299)..(300): n = unknown
  misc_feature (307)..(307): n = unknown
  misc_feature (328)..(328): n = unknown
  misc_feature (330)..(330): n = unknown
  misc_feature (340)..(340): n = unknown
  misc_feature (360)..(360): n = unknown
  misc_feature (373)..(373): n = unknown
  misc_feature (394)..(394): n = unknown
  misc_feature (423)..(423): n = unknown
  misc_feature (429)..(430): n = unknown
  misc_feature (434)..(434): n = unknown
  misc_feature (454)..(454): n = unknown
  misc_feature (458)..(458): n = unknown
  misc_feature (482)..(482): n = unknown
  misc_feature (496)..(496): n = unknown
  misc_feature (499)..(499): n = unknown
aaaaagttcagaacttccaaaattttttnaaataaacccttcttcaaaangcnggggggggaagaaaagtaangggggnctcaaaaatctancntttttcgaactaatanttgcagaagattcggcagcattcacggcccngcccncancctttcagaccaaaactgngttcattactaaaacantnatgnancttcaccatgttcaattattctgaaaatanttatgcaataaagaactgcanttcatccagattctattacaatcagctgctcctcgtggaatctcaataccataanncttatgnggcagaatgaagcgcgctcgnanataaatgaanttacggccggtatttacaantttaactcgacantaattaaaacggattcatgtnccgagaaacttggaatcttacatataaanagcggnnctgngtttatttcgactcttaagnaacntcattgcgctaaccctagagaganatttatggtgactnaana

SEQ ID NO: 721 - DNA, 500 bp, Ctenocephalides felis
  misc_feature (34)..(34): n = unknown
actttgaaaatttccaacttatttcatttcttgnggcatagttatcaacagagagactttctgggagaaagagccgctcggggcacgcagctgttttcgctgcttgatattttctacattgtttgagtctcttatttcattaacaagcgagttcttcaaaggaaattttcgcagcttgcacaattatatgatgtctcaacacacgacagtcaataatcttcttgaaattattaacactattctatcaaccgaaaatatatatttatacataatattatatgacatgatataggaaaaagaatttttaaatattttttctaatatagagtaggacggtgcacaattcgaacttaaggaactacatgacaacacataacatgtatcaaactatctactatcgaactgtgttcaataaaatgtttagttaatttctaattatatcctttcatactatttttctaaaatttatcatctgtcatttttatcacataggctgagta

SEQ ID NO: 722 - DNA, 500 bp, Ctenocephalides felis
  misc_feature (32)..(33): n = unknown
acatcaatttgtcgctccaacgagcaaatacnnacaagccagcagtagactcaatagaatgtcgagtgatttcagatacaatacacttttgattgatttccaatagaatccaggtcgaacattttgcaaaacaccattcaatagaattttgaattcgtttgccatcgagccaataatgagttcgctgattttgttttaattatcgacgttattgaggaatgttaagactgttgacaaatgtgattagaatcttaactgatatatagttaaactatatcgaatattcatactatttgtatagacagtgatgtgctgacacccaggatttcacgaattttaattgtaaatttaagttgccaaatatgcatttttgtgggtaattttgagggtaatttattgcttttgtttctatgcagagacaagaataaaatgattcaaagcgtaaacaccaataaaatgctactatattcttacttggatattcttatttctattattgc

SEQ ID NO: 723 - DNA, 151 bp, Ctenocephalides felis
  misc_feature (33)..(33): n = unknown
acaagtgttaataagagcacgtttgatggatcnactggttaatagaaatgttcgtgaaaatgttaatgtttactaataaatatatattttactaatgcaaaacaaaattatactaataaaaaaataacttatgtatcacttgatataaagt

SEQ ID NO: 724 - DNA, 167 bp, Ctenocephalides felis
  misc_feature (31)..(31): n = unknown
acgcattgtctaaattgtaataaaaatgttntttaatagaattgttttcttagacagacattttaaatgtatttcgaaaatattactgtcacatgtgaatctgtgaaatgtgtcggtttcattgccaaagtcacatgtaatgtttgatacatttacagattcctagt

SEQ ID NO: 725 - DNA, 381 bp, Ctenocephalides felis
  misc_feature (34)..(34): n = unknown
acaaccgttggcaaatatcaacttccacatcatnaccaaatgttttatcccaatcaggcgatgaatccaaatgattgaattcattacactgttcaggctgagtgtaaaataatgatgttggactttgaggcggagtaaaatgatttagttccactttatcataaatgcgttcaaattctcgtaaaagactctcagtgtcttgttgaataaaatctgtggtatcaaattgctgaggaaatttggtttctccgcttagagttttgttcataccagttgtagtagacaaatcctccagcagaggcaaatccactttctcctccagccattgagaaaatgcttcattagtaaagttatcttccagcaagcacgaatcagcaaagt

SEQ ID NO: 726 - DNA, 424 bp, Ctenocephalides felis
  misc_feature (376)..(376): n = unknown
  misc_feature (379)..(379): n = unknown
  misc_feature (382)..(382): n = unknown
  misc_feature (384)..(384): n = unknown
  misc_feature (406)..(406): n = unknown
  misc_feature (412)..(412): n = unknown
  misc_feature (422)..(422): n = unknown
acaaaatttatattataattcaaataaatttaaaaaaataataatctgaacttttatatgagcaatcccatgttggaattatgttgcaactatttgaaagaaggcagctaaattaagttaagttaattgaagtttggaattacgttgaatataattttaataccttttaagacaaaacggaaactttcacatgaaacatgctaaatcgagtaaaggacttgtaagtcctctgagaagtgcaagcagcctttacaataaactaccagacgaactaaaaacaatgacagacctaaacagtttcaaaattaaattgaaaaattacataagagacaaatgaaacaaatgagttaaaatccctattttaaatctatattanttntgntntgtaaaatattaatcacaattnagtatnagttgtatgntg

SEQ ID NO: 727 - DNA, 488 bp, Ctenocephalides felis
  misc_feature (33)..(33): n = unknown
acatacatacacatacacagacatccatttttntgatgtatgccaaaatgttcagaaaccttcaaaacaaaaaaagatcctgaaaaattatgaggaaaatcacacccaacaaattgatcttttttatgatttcaaaaattaataatacaatattaaattatacactacctaacttatgttttaattaagtatattttgttataggtaggtaatagttttcgatctttgacctaaaataatttttgaatatataaaaattatagaacatatgtgtaaatcttttaaaattttgaagacttttttaataaatcgcaaaaaagtggatattaaatttagtttataatcttttagttcttgttcgaatgttaaattaaattttggcaaagttaagtttccaagtcatttttattatttattaatgaaacaatattagcttttttggtaagaaaatcggcactttttggtaggtcaacatttattcttgtgag

SEQ ID NO: 728 - DNA, 290 bp, Ctenocephalides felis
  misc_feature (32)..(32): n = unknown
acttttcatgatttaattgtatattaccttantaactaatataaatatatttattagggcgggtcaatttaaaggtcacttaggcacttgtgattttcggattctagggatcaaaataagatactttgctgaagaaaccacacctctaaaatgaattctgatgtccggtgcattgactcaataagggtttaattttgaaaaacctctcagggggggtcccagggtttgaaccagaggcatgagttgattggccttctaaagttagtcatacatttggaagcaattggggt

SEQ ID NO: 729 - DNA, 500 bp, Ctenocephalides felis
  misc_feature (32)..(32): n = unknown
  misc_feature (62)..(62): n = unknown
accgaactatacataatccaagaataacacanagaaaaatggcagaaattttccaagtcatngttcaaactgtttccatttacaaacaatttgaagatatatcaaaataaggttgacaatatctgacaatgagtgccattatctgttttttattgattttttgcagtgtattatttctgatcaaaggttaaaaaaagtttatcttgagaatcttgttcttatactagcacgttgtagacaaagtaaatatttcatttttatttaacaatattaaacctgtgagataagccaattaaaaactgctcatatagataatttatgatttcacgttttaacaagtttaaccaatctattcgaaatcaataatacctttaaatgtaaaaaaatataaaacaaagaaatgtaactggcttgatttatttgctaaaaacagctgataaacggcaaaattcttcgaatttgcacttgatctatataaaaatatttcggttttagcaata

SEQ ID NO: 730 - DNA, 500 bp, Ctenocephalides felis
  misc_feature (33)..(33): n = unknown
  misc_feature (388)..(388): n = unknown
  misc_feature (405)..(405): n = unknown
  misc_feature (410)..(410): n = unknown
  misc_feature (413)..(413): n = unknown
  misc_feature (417)..(417): n = unknown
  misc_feature (420)..(420): n = unknown
  misc_feature (428)..(428): n = unknown
  misc_feature (432)..(433): n = unknown
  misc_feature (439)..(439): n = unknown
  misc_feature (441)..(441): n = unknown
  misc_feature (456)..(456): n = unknown
  misc_feature (461)..(461): n = unknown
  misc_feature (466)..(466): n = unknown
  misc_feature (481)..(481): n = unknown
  misc_feature (486)..(487): n = unknown
  misc_feature (500)..(500): n = unknown
acttcaagtataacccaacgattcacttccctntgtgcactttggcataaatatcccctaaaatatgtaaaacaggaaccagggcaccgtgataatgtaatcaaacgccggaaaatgatttttgatcgtatccatacctttatagcgaagtcgggaatccttgtgattatattttcctaaaaaaggaaagaagttctcgcatactgaaaagaaaagttttgtctggtggtccgatttcgaactttcaaacttattcattcggttaccgcgaccgcgaatgaaatattatgatttttcttgctcttgtccggaataagatagattgacttcgaatattaccggaatataagctggctgcgagtaaattgtttggatttgtggcttttanttatcgataaaatatgngcttnttngagnatngttggaanctcnngggtantnttcaggtcccatggntaccnttagnctaattattaatttngtagnnccaccaaaccatn

SEQ ID NO: 731 - DNA, 256 bp, Ctenocephalides felis
  misc_feature (65)..(66): n = unknown
attaaagtaaattaaatataaatgagaaattgtccttattaaattattcactattttttaaatgnnctttggacattcttttataaaaattttaacaccgtttagttctagtattctaatgtcagagaaagtaaacaagccgagtgctctggatttttatctttttagtgcatcttgatgtaagttagcttcatcttttatctgtataataaatgatacactactgaaatatatttctatgtaattatttatatgt

SEQ ID NO: 732 - DNA, 500 bp, Ctenocephalides felis
  misc_feature (66)..(66): n = unknown
acaacctgggctgtgaaaggtgaacttgaagaacgtgatggtgaaaagtatatggttattaaggangctgatatgtcgccagttccttcaaatgttaatatttatgccacaaatattttccctgataaagcagtcaatgacgctttcctagtgaccatgaatcaaaactggcgctccttatacaaagaggcgctcccaatattgagcaccctctggggacccccaatcaaaacaggaatgaactacgtttttgaaaaaatacccttccgacgtctgttcccagaatcctaaataaaaactgatagtgcaaactgaatgcttagaaacaaatatgtgattgtaatgatagttattagaacatgatataatatgttagaatagtggttaatatattatgagtatataaatttttacagatgttaatataagtatatgttaatgttaacaatttaatataaattttgtatttatatttattttgttatatacgtgtaaaaatc

SEQ ID NO: 733 - DNA, 500 bp, Ctenocephalides felis
cgatcaggcgtatttcacatagaaaagcaagaaagaatgttatgataactgcatcattgaagattcttcttattataattttatttgaatatttttgatgcaatattgtattaatgcgattgtgatacctttttacgtagaataattatgtgttgtcttaatgtcattgatttaaaaagtaaaaatcactgtcttatttaaattagtttgattctactgatgacaaaattactctcctctgctaaaattttatattactctctgctgatttttatattactacttctattttatgatttaattttaatttggttttaaattagaaaagcaacgacttagcccaaaaatggtctccactgacgaacgaaattactcttcgtcaaatacaagtattgttaacactatttttattctgagattatttttaaatttgaatttaaggtgataatgaactataccgacaagtttcagattcagatttcagttacaatagaactcta

SEQ ID NO: 734 - DNA, 251 bp, Ctenocephalides felis; identical to SEQ ID NO: 91

SEQ ID NO: 735 - DNA, 229 bp, Ctenocephalides felis
accagtgttatgttatggttatgttataccgtttaaaagacttcaatttccaatatagtgggagaattgagactcatcattttataaagcaattctgcatttagcatcccttatattataaatatatatgtattttggtgtaaagagtaatttaaaaaacaataatcaatatttttaggtaaacgataaatattagtatattacattatattaaaaaaatgtagagggt

SEQ ID NO: 736 - DNA, 333 bp, Ctenocephalides felis
acatacgagtatactaataaaatagattttagaactaatagaatcttattgcgatatatatgtgtgattttcattataatgcataaactttgttataaacgagcatagtcatttagatagtattcgtcatataatcaaatttcttctgaaaattgtcttaagcgattcctccccttaacaagcgaaagtgctcgaacgaaattactacttcaaaacaaatttaaaagataaggcatatagtcgcagaagttcgacaatgaaaggtagatgaaatagaaatgatatagggaaattaataaaatcattaagtaatctttaaagggtgacatttgt

SEQ ID NO: 737 - DNA, 197 bp, Ctenocephalides felis
acttctcacatgcaaagcgagcgctctaccaatagagctacgcccccgacaagtgacatcattttattccaagattctacgggttttatacttaacaatcactcacattaacatcacgaagacatgaaaaagtaagatttggaagttaccaagatataaaatagtaatatttggaagcaccgggtatcgatcccggt

SEQ ID NO: 738 - DNA, 354 bp, Ctenocephalides felis
acagaccttgagatacgggggcaattcttcggcttgaataatactgaaaaacgtcacaaacgttaaaatcactacaatattcgtgatcgccataacgatgttgtttctggatgtgtctggaagtcaaagtgcgtgatttgaatttttgttgcgattttggttctgtatccttagataaaatctgcgcccttgaccgtaatgccaaattcaagatgataaaggacaaagatgtaagtcgaaattatcacttctagagcacttgacatccagataaacaatgacaggcctggaaagaatcgcggtttacttatatgagaaggatgcgtggctgatgtgtcaccttgtccttggttg

SEQ ID NO: 739 - DNA, 500 bp, Ctenocephalides felis
actcttgaaagtaatgataaagtatcagtgagaaaaataaaaacacagcaatcaatattaagttacaagtgcaaattgaagcctgaaattagctgaccagtattgaaaatagggctcataattttatgtcaagtcagttaagagaacacataatctattaaataaaataaaattcaaaataaaggttaaattccacccttcttttaacactgctaatgttagtttgggatcgactaatccacaacaaaagtttatgagtagcaaaaattgccttttgatatttcacgaagaaaacatatctaataataattgtgcgtatagtttctaaagctaaataccatattctgtaatcatgtatgtaatatataaaaatattgttttttaaaaaccatttttttttaattttgaattcgaacgatctatataatcatagataaacaagtataaatattggtgttttttcagaattttatatttgccccacggtcgacgctagcgcc

SEQ ID NO: 740 - DNA, 293 bp, Ctenocephalides felis
accaatatttttactcaaacccatgaatgaaatcaaagaaattttcaaggacaaagaatctgacatacgaagatcaatcagcccaaatccacaaactatagaaagttaattatacaataatcaaaatttaaaaaaaattataggtataattgaaacatgtgctcacacttatgatcgttaagcacaatcgaccaaagaaattatgtgtaatttgtatttaaactaaactgtatttaatatatgttgtaattacgaaacttattatactttctagtcaaatctaaacatgttgt

SEQ ID NO: 741 - DNA, 124 bp, Ctenocephalides felis
actggtggagctttcgttttggtcttgtttttacttttttttataatatcatcgaaagcgctggacgctccattctcttaaaaactcaaaaactaaattgccctttttgctctttttcccccgt

SEQ ID NO: 742 - DNA, 278 bp, Ctenocephalides felis
accagatctaagttatttacagtgtaatctctgtaaaaaatgcacccatgaagtttatatcttgaatgtaagttgaataatgtagctattatttgtaaaatccctttaaaattaaaaataagacttggttttccatgtcttttatcaaaaatgtttcaatattgataaaaataatgttaaataatcagagtcatataaaatgagtttctagttttcttcttaagatcttgaaggttttaataaaatttttaaaaaattatgcgctttttaatctgtgt

SEQ ID NO: 743 - DNA, 500 bp, Ctenocephalides felis
accatcactccatgagttcgacaaccaactagaaaagacccatcaaccaattgaaaataaattctaacaaataaaaaaatattaatttataaataaaatattacctgccgtttttccataggctaaacttatttcgtttaaaaaatcttgcactgttttcttaacaccatcacttgtaaaaggtgttatgagcctttgcagatatgagccatcctaaaaataagatcatttatttaacaaattttatttagggagcattctagtctaggagtcaattttcaactttctgaaggagttgtttgttttctcgaaaaaatccgatttgccaattttattttttctcaacgtttcaagtcattctgaatcaattgagaccaaatttgaaaaaatatgtgtatgttttcatgtatgtgagccgatttttcgtttcgttttctcaaaaacggttgaaccgattttaaactagtggtgcatggcatcggccttatggcaaattgctt

SEQ ID NO: 744 - DNA, 500 bp, Ctenocephalides felis
  misc_feature (7)..(7): n = unknown
  misc_feature (16)..(16): n = unknown
  misc_feature (32)..(32): n = unknown
  misc_feature (45)..(46): n = unknown
  misc_feature (60)..(60): n = unknown
  misc_feature (69)..(70): n = unknown
  misc_feature (74)..(74): n = unknown
  misc_feature (85)..(86): n = unknown
  misc_feature (124)..(124): n = unknown
  misc_feature (143)..(143): n = unknown
  misc_feature (159)..(159): n = unknown
  misc_feature (170)..(170): n = unknown
  misc_feature (174)..(174): n = unknown
  misc_feature (205)..(205): n = unknown
  misc_feature (232)..(232): n = unknown
  misc_feature (260)..(260): n = unknown
  misc_feature (284)..(284): n = unknown
  misc_feature (289)..(289): n = unknown
  misc_feature (324)..(324): n = unknown
  misc_feature (348)..(348): n = unknown
  misc_feature (394)..(394): n = unknown
  misc_feature (408)..(408): n = unknown
  misc_feature (414)..(414): n = unknown
  misc_feature (421)..(421): n = unknown
  misc_feature (471)..(471): n = unknown
  misc_feature (481)..(481): n = unknown
  misc_feature (491)..(491): n = unknown
  misc_feature (498)..(498): n = unknown
accagtntgtgagatnaataaactctagcgtntttcgagaatatnngctatgatctttgnggggtaatnnactngtttaataatnncttatgcattacaaatgttaaaatgaaattattatgtntatttaataagatacatanaagcaatttatcttanaaatttataanctantctactaaatactgaaatatgaatttcctantcttaagattttactaaatcactgatntctgaattgaaatattcgctgaaaagtnattataatggacattttcacgtancaaangtatttaatcagtaattcttgaacattctcatttngcgtatatatttcatctataatanttacaaaaaaatatttacacatgccataaaatgaatgctccaatantcatttttatatcncctatntaattcntgtgtaactttatggcccttcatttgtattattttttaacatgcaatttnaaatcataanacttgtgttnataattnat

SEQ ID NO: 745 - DNA, 464 bp, Ctenocephalides felis
acattattgtatgaaaagcaaatttatttttgaactgtttgagttgatccacagatttcaataaaactttgtaatcaaattaaattagtcagcaaacttagcaattaaaaaattaaaataaataaatttattaatactaaattttatgaaatttcacataatttttgggatttatataatgtggtatattcatatgaaatgattaacagacatgaccaacgattatttgatcacagaaaagcccagtttagaatttcatgtatggacaattaaaaaagtttttttttaattatttatctgttatttattttaagattagtaatatgtaatgcaatcatttgaaattaatattctttatattactaataagagataacttatatgctcatacaaaacaatttatctgtttaacattttattcaaaaaacgtaattaatgtaaaattttaaacaaattgagacttg

SEQ ID NO: 746 - DNA, 500 bp, Ctenocephalides felis
acagttgacgttaatgaaatacctgcatatgaaaaaatgatccagctattgtaggtaatattacattaggtaaaaaactagacaatttaccaaaggttctcaactttaacttctgtctgtaatgattattcaaataaaaacctgcaaggccacaacaaaatcctgaaactgctgcaccgtatcgcagaggtaatctggaaaatataatttgatgttgaacatcatatcatttattagcattagatattatcattacacttttgactgttcttcccaattccatattaacttccactgatattggagagcttcgtcctcagttagtcgaatagcatcttttggtggttcacctttagaccttactaatgccattatattatatgaaatttactgctttattcataaatcatttgtgattttacattagtttcccagttaaaagttaagcaaacaaatatatttataccataagttttatggtactactttcaattttgata

SEQ ID NO: 747 - DNA, 500 bp, Ctenocephalides felis
acttttaaattttttgttatctaatttttcacattgtaattcatgttgcctgagtctcttttctaagttctggcaggtctggccaatataagagcaattacaatccaaacaatttactttataaactatatctttcttttttgttaatggggtttcatctttaattttggaatataaaaattttaattgttttaatggagaaaaagtaatacgaatattgtgttttttgaaaagtctttttgataattggttaaaattattgtcaagatatgggaaattaatgaaaaaagttttttcaggaacacttgttttgccaggctcttccggtttcttatcaaaaggttcaagtaattttgcgactctatttttaataattggacaaattaacttatatggaaaattattgccaagtaggatcgttttaactaattttatgtttgtatcataaaacagaggatcagataataaaatagcgtgatctcaagattagaatggtagaa

SEQ ID NO: 748 - DNA, 500 bp, Ctenocephalides felis
actggttgtgattgcttgaatcgagaagttaagaaaagcaacttttgtatgaatttcaggactggttctcccgtcagcagctggtcatgctggtcctgttcatcaacatctcgctagccataatgttcttcaagttgctgacgtagcggcggcctatccacaacggccctttgtggccgccatgatcacaggcataggttcattacagtcgtaagggaataaatcaaatagactttattaacgaccagcacatgtgacgcacagccgcggcactgttggcaataatataatcacaacaaaaaataaatgcaagaaaatcacaaaaaagattctagaatcgatcgaattcttcaaatcggaagaaacgaattcgccacgaaaccgcgtgactttggtttttcatttttttggcacgcaatggctgaaaggtatcggatgcgtccagataaatttgtcagtgggcgttttcagtttctagtcaatcgcctgcaggaaaagct

SEQ ID NO: 749 - DNA, 500 bp, Ctenocephalides felis
acacccaggtttgaaccggggatcactagatctgcagtcgaatattctaccattaaattatgtccccttgatcggtgacactcggcaaatagcaaatactggcaccacatcacatttactcagcaaatagttaaaaaatttgtaatactcttaaagcaaatagcaaacggtagcggtaaatcaaattatatcagctaccaatgtttttaataaattcaaagtctcatttactctacaaacatcgttaatagcgaacccctgggtttgaaccgggttaatagtgcacacgcgggattgaaccggggacctctcgatctgcagtcggatgctctaacactgagctatgtcctcacaatgtgtgttactcagcacatagcaaatacctacgccacaccacattttctcagcaagtagcgaaaattcagcaataatcttaaagcaattagcaaacggcagcggtatatcaatggcaagttgacgttatttacactgatttcagt

SEQ ID NO: 750 - DNA, 500 bp, Ctenocephalides felis
acacggctttgtagtagtcgtaaaagaattccgggtcgaagcgacagaagttcctttcattgttccccgtaatttctcaaaacgcccttttcctatctctcctgtatactttttgaatgcgtgcagcagcagcagggtcgaaggttatttctgcattcctcctacggcgtcgtctctgattggtattgggtctgcatgtgcgactagtctcgttccgagtttcaacgttttctttcggcttgattgatttggttaggtcttcgatctctttcggccaggtgtattaatagcctcaattctccggcaggacttgacctggaattttgtcagttttggagcaagcagtgaaggcgtagggatagttcttttgattgttgtttgttcgtgcacgtcttctcctcgcgatggagtcttgcttggccggaagttggtttcttctgtatggttcttaaatcgcgcaggcgttctgcaatttccctctcatttcattcacattcaac

SEQ ID NO: 751 - DNA, 423 bp, Ctenocephalides felis
acgtatttcagaccgttcaatccgggcgttgtctcgtcttacagcaaatgaatgagcttctgtcccaatttgcattaccataatggtattcatttttaaaatcggaaagaagaatattcaagaatccttcattgtatatgcaaacaacaataaatgttgctatttcaattacccgagatcgggaatgaatatgtttcggcgcgaaaatccaaatcaacgagtttagagactcattattgttctgagtttctgagcctaaacatcgaattaataatttatttgacgataaactgtcataaattggtctaatgacttcctaatgccatttgttctattagaccttgcaaaaccagtttttggagaccgcgtcagtaaagtgcctatatctttgaagataattcaaattttcaaaaatcttctcgt

SEQ ID NO: 752 - DNA, 500 bp, Ctenocephalides felis
acttatatatctatttaagcacggaacttatatacgactgaaattcgagttcaaatagaaatctcgctctacatatttatatttatttaaataattaatatgtttcagtgaaatgtttttgatttttctctagttgtgtgaacacgaaaattttaaattttatgctttattgtgtgtagatgctctgtcactttcaatttgcaattttgaagatttagaaatatagaagatggaacatggtttttgtagttggtggtttttaaatataaaagcattgttaactttccgttatagtaatgaaccaaaaattaaaattgaaaatgtttgcatttctagatgttttgaaggtttctgaacattttggcacacctcagaaaaaaggatgtgtgtgtgtgttttgtatgtgaattttttcccacgttttcgggcgcatggatcaacctatttaaatggtaaaaaaaattcgattcctattgataggacatgtgctgattcttttg

SEQ ID NO: 753 - DNA, 185 bp, Ctenocephalides felis
actatagggaataaataaatggcagctttttccttaggtcgccttttcaacgtccggattttcatgtttcgaattatacatggcgctatgtatattccatactgcatgctcgcgagctctttaataaaatattagtgttggcacgttgcacaagattggattcgatttgacacagcggcagttgt

SEQ ID NO: 754 - DNA, 376 bp, Ctenocephalides felis
actagatgttcatgaggaatatttagcgtaaaggctggttcggatatatttgaataatcatccatatctatcatattagtatagtcggtgcattcgaaatttatttcgggtgttttgtaatctctcaattgcgtcaggtcttccacattattacggtaatataagatttttcttatagctgaatctcgtatttcctttttattatcaaacaacattgctaataaaatattttccgagtgagcatagtatgcgttttctttagcaacattgttcacaatttgtcttaaattcgagtctaaatattgcgtccagctaataaatttataaaataatatactaccatacaccacagagttgtaatatttaatgttaaagt

SEQ ID NO: 755 - DNA, 492 bp, Ctenocephalides felis
  misc_feature (55)..(55): n = unknown
acttttactaatattatgatcataagctccactttcacgatcttctgcaagggtnattcgactgcaagggtcgaattacataatgggaagagcttaggtaaaaaaataaatataagtctgttacttatgtataaagtataaaatttttatatttctatgaagttaacaatttagaaattaacttactttttatgaaataagctatttctttcaattaaactaaggctttttgtgcaatacttttaatacaatgttattttttttaatatttatgcagccagttttgtaaattctcctaatcaaaagaaaccgcctcttgctatggatatcgaaaactttaattgagaaactaaaaactaaagaaactaaaatatgcttcaaagtaattaaagaagttttttggtttatgaaaaagtttataattatttatttagaagtttatgaaaattcatataagctaataatgaaagcaaactaaatattattcgaatg

SEQ ID NO: 756 - DNA, 360 bp, Ctenocephalides felis
  misc_feature (57)..(57): n = unknown
  misc_feature (91)..(91): n = unknown
accaggtgagaaatggtcgacttacttaagaaagccttagagtaattaggttaatgnataccaattgaaaagtagcttaccataacattgntgcattttttgaaataataagcgcgttttatttaatattgtttttttaaaagaaatgctaaaagctttatgtaaggaatgtattgccaaaaaataccaaatgaaatctagtcaacattttattatatcaaatcattcataattaacttagtattcagacatgacaattgagctttgattattgtaagcttttctacaggctaatatattattttaatataattatttttgttgcttgattatcttattggtgatggattaagtttttgt

SEQ ID NO: 757 - DNA, 207 bp, Ctenocephalides felis
acaaatgcaacggaagtgcgttacggccgaactgtaagtcattcgctctcgatgaactcattttaatacgggtcgattgtgattagtcgtcgtgtatgtgaatagagatctgtcgttgtatgcgtaccggcgtcaacgttgtatgcgatccgatatcaacaagaaaatcggcatggataaataaatattttaaagttacatcgtagt

SEQ ID NO: 758 - DNA, 500 bp, Ctenocephalides felis
  misc_feature (30)..(30): n = unknown
  misc_feature (57)..(57): n = unknown
  misc_feature (59)..(59): n = unknown
caaaaattgaaaaaaatatctacaaatggntacatatttttgaaattgtctagaaangngtaaaatatgtagaaatctaaaaatatctaaaaatccatagaagagtctacgtataaaaatcattctcacgaatacaatttacctgccaatgttgtcgtgtatcgtatatttttctgatccaatcttgacaaatgtttcaagattgaggtcagattttttataaaaaatcattataaattatttcttttccacccctatttatgacatttttgaagaactgacaaaactcaattttaaagcttctatgttttttattttttgagaggagcaaaggaaattcttcatcttcctacaaaaaaaaacaataaaaataatagaagtgatactctgcaaaagaagaaaaactttgttatgtgaaaatgagattgcagtgcttgcgggcagtctgcaagacctttaaagactatgcaacactttcaaacagtctacaatgttctaat

SEQ ID NO: 759 - DNA, 500 bp, Ctenocephalides felis
acgtctatttagcaggctagagtctcgttcgttatcagaattaaccagacaaatcactccaccaactaagaacagccatgcaccaccacccaccgaatcaagaaagagctctcaatctgtcaatccttccggtgtctggacctggtgaggtttcccgtgttgagtcaaattaagccgcaggctccactccttgtagtgcccttccgtaaattcctttaagtttcagctttgcaaccatacttcccccggaacccaaaagctttggtttcccggaagctgcccgccgagtcatcggaggaacttcggcggatcgctagctggcatcgtttatggttagaactagggcggtatctgatcgccttcgaacctctaactttcgttcttgattgatgaaaacacatttggcaaatgctttcgcttctgtccgtcttgcgacgatccaagaatttcacctctaacgtcgcaatacgaatgcccccagttgtcctattaatcattac

SEQ ID NO: 760 - DNA, 338 bp, Ctenocephalides felis
  misc_feature (62)..(62): n = unknown
acaatattttttcaaaagggtcataaaagtgttcgttttaaataggtattttattatgtgtnatataactttgataaaatttcaaacgcgtatttatacatcagcgtttgcgtatccaccttaatttcaatttaattttcatcggttgattatactgaatataataaagattttgtgtttattataatttaagtataaaattgtagacaataatattctacgattcaaaaatctataacacataattgatttaattttagtttaaactataaaaaaggggaaaaactcacgatttatatttcttctagtaagtgtaagcttagatatgttgcttttgt

SEQ ID NO: 761 - DNA, 348 bp, Ctenocephalides felis
  misc_feature (29)..(30): n = unknown
accaaaaatcttattgccccaaatttatnntatctaacactagcctatttttatatatttttacaaagaaaatgcgaaagttatatatattatagatatttttacgtctagtcgtttttatataaatactcaatatatcatgaaataaatcaaataaaatataattataattctatatataatgaatcaaatttaatttaatttttgtgacatttattgctatttctgagatcgtgtcataaatgatctcaaggaaattttcgttggcgatttgccatgatttaaattaatgttgcttaaatatttgcaacgcattttccttataaatagtctaaattagaatcaagt

SEQ ID NO: 762 - DNA, 372 bp, Ctenocephalides felis
accttctacattactaaaacctctgattttttataaagtagatttattacaaatatttcaaccatcgacaaccaaatatcgtgtcaaaatcgatattagcttttgaagatattctgaaagtaaacagcgattccacgtattttttattagtttcgggaagatttttatttggctataaaagtgttttgattgctcgagaacaagatgttatctcttcacaacaatctttacagataaacagataaactgagtcttcgattaatggcagtattgaaatgaggttttatataataattagacacgaaggcaggtccagcagtctgagcatcagtttcgtctatgattgcaagtatatatagggtaaggcgaggt

SEQ ID NO: 763 - DNA, 500 bp, Ctenocephalides felis
  misc_feature (57)..(57): n = unknown
acggagtgtaaaatattgttgaagtattttgaaatttattaatttattcgaaaaggngatttcattaaataaaaatggtttacgaaagtgacttttacacgacccgtcggccctacagtcgtccggctttgtcttcatactccgtaacgacgccgtcccgtcattacgtggtgacagacactccatccagaccaagggtagcggaagagcaatattcttactcctaccgcagccagcaggaaagatcttctgcagatccctacggaaggaactattcgacaacttccaccaccgaaagcacaagacgtgcaggcggttatccaggatctgactattcttacacgagcgaacgctcatccagaactggagatggaccaggtagctacagatccagctacagctccactacttctggacgtcttcctggaggaaccacttaccgtcacttctcataccgtgtgtaaacacgaaaattgaaaaattggtttgataaattggtt

SEQ ID NO: 764 - DNA, 302 bp, Ctenocephalides felis
  misc_feature (62)..(62): n = unknown
acgccaccacctcctgggcattcaccttcactgatctttttcaattctttgtgttgttcacngttataattcctcataacgcattcatttccaaatgatatcggtttttcaccatcaacaccagcgcatacaggagtgtagtcgtctgtgcagattttaatgcatggtggatttctgttttttgcgggggtagcttcgattaggctagccaatgccacaaataaaacgacagccaccaaataaagcttcatccttatttatcttctttccaaaaattcgatgttgtctctcagatatttcct

SEQ ID NO: 765 - DNA, 500 bp, Ctenocephalides felis
acggaaggtatttatattaatgtcaactctcaaatgcataagaaaagcttatggtctaatattgccactggaaaattgtctaatttaatattaatttcttctatgtttgtaaattcgttattacatattcctgtagtaagattaatatgagtatgggtttaatttagtagtgaatactatagtaaccctataaacatagacattaagttgatcaacgcgtttatatcattagatctttcaatgaaattagcattaaaaattttcaaataaaaagcgtcttatattatcgcagtaaagtttccttaactctccaagaatgaataaactgacgcattaggtgatctatacatcaatattacagcgcgttcattgatatttcgatgttatttgctcacattcaacatttttaaagttttttcattctcaagagtttccggcgatgttcccggtgctagtcgaaacacatgcaggtgggctttcctttctactcccgtgatatt

SEQ ID NO: 766 - DNA, 500 bp, Ctenocephalides felis
  misc_feature (56)..(57): n = unknown
accagagatgaaatttgcgtgcatcacccggaagttttggaagacattgccaaatnngaatgactacaaagcggtttcaggaattgaaaacgaaaacatagaacaaataataaatcaagctgacctgcaaaagtattatccagaaattataaatttatacaatacaatgcacgtctttgcgttacctctagcacatttgcagtcttgtttcacgtttaatattgaaaatattcttaaaaacgaaaacaatatcagttatgccaataaaattaatggatttatcgaagaattacaaaactttgtagtaatagctcaaacgcagtctaaattggggccaaatgaggaactcacaactttaaaagatgtaagcgatcttaccacacttgaagatcttagtcataaaataattagtgaattagaaaaaagcagtaacagcagtgatgaagtaagttcatttgtaaaatcattgaagaccctaatatgcttgtgaattctataaa

SEQ ID NO: 767 - DNA, 479 bp, Ctenocephalides felis
acattttccgcaaacatgtttgttgcaactttgacacgtgttattagttttattattattacaaagtcttatttggcaaaattttcttttattactattggtatttgcaagatgtctgtgggtcatcattttcctttgattttttttgtgttgatgtcgtgtagtccgcggaaagctgttctgccaattcaaacaaaaactgttctctaaggatttgttttctttggatttttattcctgtcgcttccttgtaaagaatccaggcatttatcgcagccaaatccaaaatattgaaaaatatttgcaggggtcatctattggattggaactggatttcacggtatattttctttacctttgatctgccatgtcttctttgctgaccataaataagtcattttcaatttttttgctcataggccccacgagcatataaaattccaataaatgcacgtatttcggtaacgatttgctaatcg

SEQ ID NO: 768 - DNA, 500 bp, Ctenocephalides felis
  misc_feature (37)..(37): n = unknown
actcaagatttgttacaatactttataagacttaacntaataatacgatagataacctattacctatcatactatattatattattgtgtatcatcgatagatatctattatctatcataccgtgagatacatacaccgtcattaacttgtaatatacctacagaccttttacttcttataaatactactgtctaatttatatattcacctatattatataggtttaccttacgccctatgtattatctctacctatctattgtctataccaggaattgaacccgggacctccgcgtggaagtcgcgcaccttaaccactaccctatcggctacccccattaataatataatatgggacgcactgttgtttccgcgggacattttctaattaattagataattaatactaaggtggcgcgacaacacgcgaaaaaagacggttgattgtagcgttacggtggccgagtggtaaggtcgtcgcgtgccacgcggcggaccc

SEQ ID NO: 769 - DNA, 500 bp, Ctenocephalides felis
  misc_feature (37)..(37): n = unknown
acaattatgttcttatttaagctttgcaataattctntagactgtcctcttattctcaatcaactatcctttaatgttccaaggctatcttcgcgttcacaattatttttcaattatcccacccctaaatctaattctctcttaaattcgccaattttactaatgtcctctaactttaacttaattaataatgaaatagacattcacaacacatcacctaatcaaataatctccatctgcacaagttaatctttttattttctttcaaatatcttattattttctgtttataattattattgttacattctgcattatatgaaattttatcttagcattttatgttactaactatatattgtaattttgtgtatattttaattgttattcattatgtcaaataattgtatttttgagtcctcttggagaaatctgtgggctatatatttaaataaataaataaataaataaataaatatatgtacaaatatacttataag

SEQ ID NO: 770 - DNA, 106 bp, Ctenocephalides felis
  misc_feature (30)..(30): n = unknown
  misc_feature (33)..(33): n = unknown
acaaattattgttgtgtggtagtttactanttnagagtaaagtaaacgtaacacacaattgcatatgcatatattattattcttatatacatataaacaatagtgt

SEQ ID NO: 771 - DNA, 453 bp, Ctenocephalides felis
acataataaatcgtgataaaattaattcaaagtagcacccaaaaaccaccgaactttgcacgaaattacgttttgttctcaaaaaagaaaaaggaaataaatcaagatggtccaaggcgagaaatacctggcaaccaagtccttgtctattgacaactctcacaagaagagtggattcgacgctgtgcaaaaacgcgaggaggagaaaaggcagcaggccaggaaggagcaggagcagaaagctaaatatggagcctggggtcctgttttcaaagacagggaaacttttgccagcatgcacttctgttgaaaacataaaattttatatggaataataaatttgttttataaaatactagcatactaacaaaaggactaacatgattctaccttggacctaaatacaatactcaaataaattggaacaaaacagagatggcaacgctttaatgt

SEQ ID NO: 772 - DNA, 182 bp, Ctenocephalides felis
acaaagccatcactccaccaattacgccagtttcaggccacatcaaccccgctttttttcggccttatgacttgttagtttgttatatctaaatattaaatttatgttattcaacaataagtaaaccccacaacgtgaacaacactgctgttctttgtcctgaggtaggattcgaaatcggt

SEQ ID NO: 773 - DNA, 500 bp, Ctenocephalides felis
  misc_feature (33)..(33): n = unknown
acaaaggtccaattgaacttcaagtaattactntatttaaaccaaatgaactacatcatacatgtaacatgtgtaaatatacaactacagttttttttctaaaatttgtcatatggcccattttaccccataaacatagataaaatgggacagtcaggggacaacagttcttctaatgtctgattttacaaaataatagctaaatatttaatcaatgaaaaatttacaaagattatattgtatatgacttagatctggtattttatcagaagtatttatgagcagagttggtataattattaatttttttccttgtaaaattgcttttttttaactgagtttacatttttatttacattttttattatatacttttttgccagggtaaaggttcagttggttctttttgccccatccacatgtaagccattatagaggttatatagaaacatctgttgaatctaatttgaaattaacaatagattttataaaacaattca

SEQ ID NO: 774 - DNA, 500 bp, Ctenocephalides felis
  misc_feature (415)..(416): n = unknown
aacatttctgtgataaataaactctagttgattcgagaatatttgttatgatctttgtttctaatgcacttgttaataataattatgcattacaaatgttaaaatgaaattattatgtttatttaataagatacataaaagtaatttattttagaaatttataatctattttactaaatatgaaatatgaatttctagtcttaagattttactaaattactgatatttgaattgaaatattgctgaaaagtaattataatggacattttcacgtagcaaaggtatttaatcagtaatttttgaacattttcattttgcgtatatatttcatctataatttttacaaaaaaatatttacacatgccataaaatgaatgctccaataatcatttttatatttacctatctaattcgnngtaatttttatgggcccttcatttgtattattttttaatatgcaattttaaattataagatcttgtgtttataattaatttatt

SEQ ID NO: 775 - DNA, 473 bp, Ctenocephalides felis
actacgatcaatggtgtgatagcttcgaattaaaatgttgatactatcgagtatccaaattaaatttggaaattaaaaaatgttgtgtgttaattgacagaatctttacttcttctaaaagcaaatgaataagttatatgttatgttacttataaaataattaatatttttaaatacaacaataatgtctgcattattatcttaacgatgggaaaatgtagtaaaagtcaacagatctagttgaccgtatcactcctgattattaaccatagggttaataaaagtattataaattcatcaaaatttaatattaaaaatgatcaaacaatactgatcttattatgatcatacctaattatacatgtgataatataaaatttcaaatcaatacactagcgaatactattattagtttatcatagactaatgcattgattaaaattcagggccatccttaaattaattaaaaactg

SEQ ID NO: 776 - DNA, 499 bp, Ctenocephalides felis
  misc_feature (7)..(7): n = unknown
  misc_feature (22)..(22): n = unknown
  misc_feature (41)..(41): n = unknown
  misc_feature (45)..(45): n = unknown
  misc_feature (61)..(61): n = unknown
  misc_feature (64)..(64): n = unknown
  misc_feature (73)..(73): n = unknown
  misc_feature (75)..(75): n = unknown
  misc_feature (81)..(81): n = unknown
  misc_feature (85)..(85): n = unknown
  misc_feature (109)..(109): n = unknown
  misc_feature (125)..(125): n = unknown
  misc_feature (137)..(138): n = unknown
  misc_feature (153)..(154): n = unknown
  misc_feature (157)..(157): n = unknown
  misc_feature (159)..(160): n = unknown
  misc_feature (163)..(169): n = unknown
  misc_feature (175)..(175): n = unknown
  misc_feature (183)..(184): n = unknown
  misc_feature (189)..(189): n = unknown
  misc_feature (194)..(194): n = unknown
  misc_feature (197)..(197): n = unknown
  misc_feature (204)..(204): n = unknown
  misc_feature (209)..(209): n = unknown
  misc_feature (221)..(221): n = unknown
  misc_feature (230)..(230): n = unknown
  misc_feature (232)..(232): n = unknown
  misc_feature (242)..(242): n = unknown
  misc_feature (249)..(249): n = unknown
  misc_feature (253)..(253): n = unknown
  misc_feature (307)..(307): n = unknown
  misc_feature (331)..(331): n = unknown
  misc_feature (336)..(336): n = unknown
  misc_feature (342)..(342): n = unknown
  misc_feature (352)..(352): n = unknown
  misc_feature (362)..(363): n = unknown
  misc_feature (366)..(366): n = unknown
  misc_feature (387)..(388): n = unknown
  misc_feature (390)..(390): n = unknown
  misc_feature (396)..(396): n = unknown
  misc_feature (400)..(400): n = unknown
  misc_feature (439)..(439): n = unknown
  misc_feature (449)..(449): n = unknown
  misc_feature (456)..(456): n = unknown
  misc_feature (476)..(476): n = unknown
  misc_feature (491)..(491): n = unknown
  misc_feature (499)..(499): n = unknown
acctttncacagcctctcttangtctgatgttagacgttcngctngcaacttttgttgggngtntcctcggcncncaacgngagntagcctttgaagatctctacttgnagctgatattagctgnattgcactgaanngtggcgtatgactgnnaanannacnnnnnnncccttnccagtttnntatangcatntanataattntaagncatttttataanctattatananattatctatnggggagncagncataattgaaaccagttttttctatcaatcatagatgatgtaatggtctaactntcaatagaactattgaaagttacnccatngcatantgaaaattanactattcaannatnaaaataatacaataattatgnngnagcagntacnttttaactattgatactaatgctactttaatatcttaancaactaagtnactcatnttgctagaaaatatctaatnaaattatataaactnacatcttn

SEQ ID NO: 777 - DNA, 500 bp, Ctenocephalides felis
acgttcacctgccgcgcaatcacatcggctggtcaagtggaaacctcagcaaaacttgttgttaaaagtaagaaataagacatggactcgctctaataattgttctaacatttaaattactattatcactagtcttgctatatttatttgctttgttttcaatttagtatatcaatcaaagttagattaatagtagtttttcgagctatttaaaaatgattttaaagcagtataaaaatataactctaataatattattgcgattgatatatttatataaattatttattctatagttcaatttaatagctattaaaagtatattgtgaatataaataaaattgcttgccatagatatattaaaatatagcttaagcaactgtctttatatcatattagtaaggtcctaatcggtcatgatattttgtggtgttgattattattctgtgctgtaatcattgtccaaatgatatctgattgtttaacatgatacaaaaatt

SEQ ID NO: 778 - DNA, 188 bp, Ctenocephalides felis
acatgcgtaaagtgcaatttaaataagaattaaagacctattaagaatgttttatagcaccttttatgtaatttgcataatcatggatactagagcttttatgtataaaaccttattcggccatttatttatatccagaaaagtaaaaaaataagctggctctaaaatgactattatttataaaaagt

SEQ ID NO: 779 - DNA, 500 bp, Ctenocephalides felis
accagatagaaaaagttagaagtatttgatgataagttgatgttctcattatttattttataatgacataattccagttaatcattccaccgttattttgatctgactcattcctaatttactaaaatacctgaaacaaaattccgtccattaatagaacagataaaaaatcaatccattactaacaggcggctttcgattttcgttacaaaatgttttaatgttactttcaaaagattattatttgttgctttgttctaaatatggtttccgttttatcggattaaaattggaattaatttctaataaatgtctataatttatgatcattttacaaattgatctttctctcgaatcgaatggacaatgtgtgtcaagaacaacaatagtcaagatctattgattggattcgattggatctttatcgattattatcagtatcacacctttggataaagttcagaaatgttgtaattattgtattaatatttatatgttac

SEQ ID NO: 780 - DNA, 434 bp, Ctenocephalides felis
acgcacgtgtcagaattggttgaaaaaatcagtttacagaaattttacttaatcacgctcattgaacagtatgcacaattttctcgtcagaatcgaggtaaaattttgctgtgaaaagttgaaatgcaactattttttatactggcttaatcggtaatatattttaaacatattgtttgagaatatgtggttgcaacctaaatgtaatattcaaagatttatatgcaaaaattctgccaattctccatgaggagtatattcgtcaatcacagttttaagtaaaggtgatcatcgttctcgtcgagctattaaagttgatgatcatattgtagaaattttatacgtattgcacacaataattatcttggaattgttattagacttaaaccttttttgaaggccatccttagtgatggtaaaaaatagagtcatga

SEQ ID NO: 781 - DNA, 500 bp, Ctenocephalides felis
  misc_feature (213)..(213): n = unknown
  misc_feature (482)..(482): n = unknown
acgggaagttccagcaatttgccttaagtgatgctatacaccactagtttttaatattgatgaatatacgtatttaattgaaatgttgaaacttgtatatccaatagtaaataattcgtatttgcatttctatttgaattacagggcttgaattgagaaatattaaatgttttttgaaataatgctttgaaatattttgattcgaaatattanatccgaattaaaatattattagaattattatttttaatcgttgaatatgctttttaattatttattcattgaacttaaaagcttcttttcacaaagatttattaaagagcaaatatgttttataagtgagtctacttcctgaaaaatgtcagaatacttgcattttaatatatatttcagctaaatgacaagacattggcaaaacttgtattcacttattttaaattctgaagaagacacaacatttaaaaatattgtcgatttcttgnataaattatcgcccttaa

SEQ ID NO: 782 - DNA, 500 bp, Ctenocephalides felis
  misc_feature (195)..(195): n = unknown
caaactttaatagatgcaagaagcaaattaggatcaaaacccaatttatctattttttagtgcagaagatttttttctgatgcattaatcttcatacagttttatgttatataaaattataagtaaatattttacctcaacatcactttacagaatttcagtaaaaattgagcaattaatacaattcaatattgnaaatactcttactggttggagagcggatagtttcaaaaattttctaaagaaaaattgagtgtcaacccgatgttctatttaaaacggattcgttatatgccatttcattaagatcgaaacccaatttatctatttttaatgcaaagatttttttctataattaatgtattgaccttcatacagttttatgttatataaaattttaagtagaacattctacctcaacattacttaacaaaatttctataaaaattgagcagttaatacaattcaatattgaaatattcttactggtggagagagga

SEQ ID NO: 783 - DNA, 500 bp, Ctenocephalides felis
acttcttttgtaagaattaatttgtttatatttatatgtatgtatatgctaaaattacaactaggtatttataaatcagaagagcttgttttaaaacaattcatatttcgccgactcccctattgaaatataaattaaaattttgctacgactagaacgcgtggtttcttgcaaagtgagatcattttataatgataaaattctgaccgaaaattatatgtcgaaatgtcagaccagaattagttgagtgtaaacggtttattcgtctttcaatgtccggcgtaagtcacaatacaatatacgttcactgaagcgatacgttaaaaggtgttatagaataagaatgcatttcaataatgaataatacagctaaagattgaattatatcccactttgcaacgcatatttgagttaagagcagagaccgacggcagacggcagagagcgatgtccatgccgtcgtcgtgcctgaaatattattattccacttaacatctgaa

SEQ ID NO: 784 - DNA, 422 bp, Ctenocephalides felis
  misc_feature (64)..(64): n = unknown
  misc_feature (203)..(203): n = unknown
actttcttcccaaaactcgactttttatttgaaaacataattactcggttgtagtaaacttttntaaaatatgtaacaaattacttagcatctttctaaaatttattcaaataagtatttaaattaaatcttcctctataaaatcgttttatttctactaatttccaataaatgacttctcgctttgctgttttttatgctgngggacaaacaacaaatgacatatgaccaagcgttgatatatgcttgagcatgatatgtcatgaatgtctttattgtaattatgcctaatgccttaataattttcttgaaaatattttataccactattccgtttccaaattcatctaccacgagtaaggtatacatttgaaagccataaacaatagttccatttgtatcatcaatgcaatccctgtcgg

SEQ ID NO: 785 - DNA, 500 bp, Ctenocephalides felis
  misc_feature (14)..(14): n = unknown
actataccggtgcntaccgtggcaagatgaacgtcccaaaacgtcgctgatcaaattaatagtcctcgtggctaatttatttattctggaaaatcgtgcgatttgtttgtgttcacaaaatttccgtttaccaaattttcctctataatgttcggagtgttggccgccacctcgatttggttactattggcatgggcagctatgctaatatttttccttccgttgatgttcgttgtgttagcagttttgccgggactgccattactgattattcgaagggtgtgctacgtgcccttcgattcgatttaaatttgatttcttcaattaaaaaatcaattttaaataaggcagtgttctttgaaatagttatttaatcgtgtcatttcatagtagttgtgatatttatattttttaaacatatatcttctaatcattgataagtatgatatttatacatagtcttacatattaaggtataatatataatagattagtcgtat

SEQ ID NO: 786 - DNA, 500 bp, Ctenocephalides felis
acaattgaaatatatcacagtcaacaataaaactgatgcaattttagcacaattgaagaatgaaatccaaataccataaacaacgcttaacaaccacctagctaatgatgagctaggtggttgaatattggtaagtaatataaataatgactttatcatacaataatattactttcactcatcaatttgacacaatttcccaaataattataccaataactgagaaaatttttgaacaaatttcgacagttggttatttgatatatgttatgtgctgatatgattataagtgtatgatatatattgggatgcttaatggaacatttcactcaaagatgcatctaatgcagctcaacaatcaatcatgaaagatcgaccgcaattttccatcttgataactagatgtaacaaaatcgcatttttgtttagatatttatttatatgtaataacactgcaatgcgtgattggatatcaaaatcccataagcgttttttataat

SEQ ID NO: 787 - DNA, 500 bp, Ctenocephalides felis
actgaatattgttgtggtaattatttctggtacgaatgattcctttgtggatacggtagtaacttcttgtagcacccgatctgttatgaagtcggggatatctttgtctgcattcatatctggtggtggtgcagtatggcctggatttgtttctcttgggcctgttgtatgaatttctttatcatgctccgttggcaaaatcggaatatcgctacttttatttttaaaaatctcttcatcgtgaccagcaatattattattgttgttaccattaatatttatatcgattccttctgtgatatctgaatattcatcaataaaatcatcggagcttaacgtgtctggagttggagtcaccttcggtttaaatgtggtcagacgtggcaaaggaggaaaatcgctttcttcattcattttttctgtcacattcatgattttcacaatcatattaccgtaagttgtttcttcgattcctgaactgcttgataatgcctcggccg

SEQ ID NO: 788 - DNA, 436 bp, Ctenocephalides felis
  misc_feature (1)..(1): n = unknown
  misc_feature (37)..(37): n = unknown
ncatttcaactgagttcattaattgagttcattaatncgtgaatgccaaggcatttacctatatcctattatgtaaaataacgatggctgcatttctttgaattacaatcgttattaaaactaggcaaactgaaatttttgcccttggattgcagtgcttgagtgaatcgcttttggcaaatgggataattataatcatatcagagtccatattatgtggtccaatatttagttaagatttgtattatacacacagcaaaaaatataaaatataataaatatatcctggaaagattagtgaaaactattataaactaagacttctcgatatactttcagtgaatccaattacttcgaaaaaacctttggagttagaaactaaattcctagtagtttaaggataatattttgatttgaattgtaggctgctgtatgt

SEQ ID NO: 789 - DNA, 277 bp, Ctenocephalides felis
  misc_feature (1)..(1): n = unknown
  misc_feature (65)..(65): n = unknown
nctccctccaacgcaggtgcatcgtcgttggcgtcgtcgctgatctccgtgggggtataataaancgacatcttactctgagattcattcaaatttggaacttctaatgcagccaacttatctattttcgttttaatatacatatctatgcctgcaatatctttgggatcgaacacaacagagtcgctacgaccgcaagaaccgcttttacaattctcgaaatagaaactgggcaaattttctaaaaccttattaagagtctgttgctggtatttgt

SEQ ID NO: 790 - DNA, 500 bp, Ctenocephalides felis
  misc_feature (60)..(60): n = unknown
caattttgttgatggcatgataaatataacttcttataattaatattgcagattaaactngtggtatactctttttgccatcagcattttttattgattgaatacaacagattgttaaataatatttccaatcaataattgtgatggtttatttctactagatttgaaaatcatttgattatgatttaaacatataaaaccgttaaatctcgttttaattatttgataatagtgctgaattacacattgtagccattatattaaacaaatattcaaatacttattagtcaaaattagttgttactataatttaatttaaatattgtgcaattttatgtagtataatttagaaatttattattaaacacgtgttttattgtgaataaaatataagagatttatgggaactttttcaataactgaaattgagttgctttgcatttttttaatatgatgaatcgtttttgaaatccatatttatattttattaattgacctgc

SEQ ID NO: 791 - DNA, 326 bp, Ctenocephalides felis
  misc_feature (11)..(11): n = unknown
  misc_feature (28)..(28): n = unknown
  misc_feature (46)..(46): n = unknown
  misc_feature (62)..(62): n = unknown
  misc_feature (68)..(68): n = unknown
  misc_feature (73)..(73): n = unknown
  misc_feature (84)..(84): n = unknown
  misc_feature (86)..(86): n = unknown
  misc_feature (89)..(89): n = unknown
  misc_feature (94)..(94): n = unknown
  misc_feature (106)..(106): n = unknown
  misc_feature (114)..(114): n = unknown
  misc_feature (117)..(117): n = unknown
  misc_feature (119)..(119): n = unknown
  misc_feature (183)..(183): n = unknown
wcmdkccadgnhtastcrysktwbkhtntahdvdacsagdmhacrnvcwrtbwwyrrwykvnwmtmsnwrmanrgarcyrchsncnamnbtydnachcksmcratndatstrandsncncttacaccctccatgctgatgttgaagaatcctttcgtgtgtatttggaacaggttgacgcctncatcaaatttataatttccttcgaaaatcaaattgtcgaacatcaggtcaatttccatttctaaactgtcatcggtcacagttgctctgacttctttgatttcgcaattgctgctcccgaagactttgttgtcttttccctgt

SEQ ID NO: 792 - DNA, 500 bp, Ctenocephalides felis
accgttgttcctagggggataaaataagcaggttataatttttgtaaataacaacaatatttataatcatactggaatttttacagaatttgtggagcaagcctagataaaaattttgccttatttctcaagatgttcatatcttattatttatgttcaatattaaataaaaacattacgaattatgattataaacattaggaaataaattacaatatgactaaattaattttcaatctcctatcatttcagttaatttttactggtgctattatagacttgcttcattaagtttcagaattaccttcaatagttgtaattataaaatatatttataaagtctataaattagtaaaaattgtatccgagtaagcaattttaaacagattatttactcacttaatacattcactaattatatggaatactattagttagattagaagtagtttatgaacaaatgatttgttcatataggagtggcttgtgacaacaaaatg

SEQ ID NO: 793 - DNA, 219 bp, Ctenocephalides felis
aatatgggcaacaataaaatgaacattaacaacgtgaaggcgttaatgtcgcaatactggaagttatacgtttgaaattaccatgtggctcatatttagtatgtttaatacatttagaacccacaaccacgctaactgataattaatatttctaaacggcaatacgtgtatcattccgtgtctgctatcttcgccataatcaaataaaattgtttatgt

SEQ ID NO: 794 - DNA, 252 bp, Ctenocephalides felis
acataagaataagttattattatgaggttaacgacgcgcgaactaaaattatcacgctgaaatttattgcttgaatacatattaaagtaacataaattcaaacttacacatttattcatttatattaaatgaataaatgtataaagattattaccattcacgttcttcacatattgcgtgcttacattattactttgattgtgcaaatattataacatttacattatgttctaatgagtgattttttcatgt

SEQ ID NO: 795 - DNA, 500 bp, Ctenocephalides felis
  misc_feature (413)..(413): n = unknown
acttagctgcaagcttttttatattctgaccttgttgcatgagttctctaaagtattcgggacactcatcacgttttaaaaatcttaaaaatccgggcatagcagcaaaatatgttgactgcagctgtgcttgagaccaaggtccagaggcttttgctttatcattttctagaccagctcctataattaatgcggctgtttttgttcgcatagtgtttgttgctactggccagtaatttttcttagaatcccatttcttgatattaaattgtcctttatatactgtatctaaaagttttccgagctcgaaagcttctttttttccaccttctgttaatttactagaactctctgataagttagtcaacttgggtcctccaggataattgcaagcttcatggctggacctcttncatacaaaaacaaactgaagttatcattgctaaaatgtattgactgactagcaaatcaaaagaatcaataactctcatgtactataa

SEQ ID NO: 796 - DNA, 500 bp, Ctenocephalides felis
  misc_feature (9)..(9): n = unknown
  misc_feature (12)..(12): n = unknown
  misc_feature (24)..(24): n = unknown
  misc_feature (43)..(43): n = unknown
  misc_feature (57)..(57): n = unknown
  misc_feature (70)..(70): n = unknown
  misc_feature (76)..(76): n = unknown
  misc_feature (78)..(78): n = unknown
  misc_feature (80)..(80): n = unknown
  misc_feature (112)..(112): n = unknown
  misc_feature (177)..(177): n = unknown
  misc_feature (247)..(247): n = unknown
  misc_feature (290)..(291): n = unknown
  misc_feature (298)..(298): n = unknown
  misc_feature (326)..(326): n = unknown
  misc_feature (381)..(381): n = unknown
  misc_feature (394)..(394): n = unknown
  misc_feature (414)..(414): n = unknown
  misc_feature (429)..(429): n = unknown
  misc_feature (441)..(441): n = unknown
  misc_feature (468)..(468): n = unknown
  misc_feature (474)..(474): n = unknown
  misc_feature (486)..(486): n = unknown
cgggggccnacncttatccgatanacccatagaccttatactntcatagaccttatncaatacatggacngggagntnancgcataaaaagcgtcaaaagatgtcctacggnatgagggcgtacgagggtaattttgcggccgagatatgtcaaatacgaacacgagctttaccganattagtcgaatgcactcgatcgcttaaattttacagttacttgggttcacgtgatgtttgatcgttcggntttttaaactaaaagatgataaaaatatacctgttgtaaaatnngttaaangtaaaatgtcttctaaaatgtgtaaggnaaggtgcctgattgcagtaaaacctgttttgtgctgttctgtatgcttcgcaagnattccgggaaatncgacattgatcgtttaaaanatcgaggattctttnatatccttcgangaatgtttatttatgttatatatagantgctantcaaagtctttntttatgtacaaagt

SEQ ID NO: 797 - DNA, 324 bp, Ctenocephalides felis
  misc_feature (290)..(290): n = unknown
  misc_feature (306)..(308): n = unknown
  misc_feature (316)..(316): n = unknown
  misc_feature (323)..(324): n = unknown
gctgaaggcatgaacgagcaattgagcaatttaacttaagaagttttgacccaagcccaagcaggggccgccgacgtgcgttccagtgtcgacaaattcgccaaagaacacgaagccacccacaccggccactaattataaacagaaaaccttctgtgatcatcatttatcatatcaaatatatatataaattcattaattaattaaaatttgttttatagttgtttaaataatcttcggatatttgtaaaaattatttggatgctcatttgatttatattataaataanatacttcataaaaaannnaaaaatanaaaaaann

SEQ ID NO: 798 - DNA, 500 bp, Ctenocephalides felis
  misc_feature (468)..(468): n = unknown
gcctggcctttgtggtcacgggcaggtaaaacccttgacaacttcgattgcatttcaccttacattttcaaatatgtatttggtgtgtcactagtaatttgcataatgtgtttagaatgttccggtgaaactttgctgctatttataaacgttaagcggaattagtgcattacgttcaaggtattatacgagcataattttacataatttaattgattgtcgcaagctacacatttcattaattattctgattctattaactaccgcagattatcctgaaactaaaaaaaatatagatttttaactatcaaatatctctttacctactgctgttcagtattcttttaacagtgtttgaattgataaatgcttttcactattttatttgcgaaaattatggaatattcgcaaacactttatcaaataaaatgataaattttcgtattctcaaaagtaaatgcttgtagnaatctaaaataatctaatcatcgcccaaagtg

SEQ ID NO: 799 - DNA, 500 bp, Ctenocephalides felis
  misc_feature (60)..(60): n = unknown
  misc_feature (467)..(467): n = unknown
acaataaaaatacgaagatataaataaaaaaatgagaattaacttttttaacaatatggnaagaaatttattataagactaaaatattttgttgtatataaaggtaagacacaactaaaataattgaaaaatatgcaataactcactatacaaataatttgaagaaaaaacaaaaaacacggaaaatataatgcaccaattactatacaattgtcaaagcacgaattttgaaaactattaaattaaaacaaatattaaattaaaataaaataaatgaaaaggttttaaaaaataaactcttttcatcgagacgtgttatatgtttggaaaaaaaattactagtgaattgtgttgtgtgtttctatgtaaagataaggaaactcgaagagctgtttcgttattggtgaaagactgagataggaaagtttttgtggcgctttgccggcgaaaaaatacgaagtaaggantggaaaatatagctttggattaagctgtaatag

SEQ ID NO: 800 - DNA, 500 bp, Ctenocephalides felis
  misc_feature (62)..(62): n = unknown
  misc_feature (70)..(70): n = unknown
  misc_feature (403)..(403): n = unknown
  misc_feature (479)..(479): n = unknown
  misc_feature (491)..(491): n = unknown
  misc_feature (499)..(499): n = unknown
acggaatatacgtttccgtgacccttgagtgccaaatcaacagatggttcaggactgtgggnaaccttanatcttaattcaacacttcctggtgattttttctttgagtcgttaagcgtgaaaactgactcagtattgaaaccaacaacagtcttctcgtccaatccgctagtttgaaggtcaagtggtgcaatcaggttatatgtgataccttggtattcagcgaatttgctggccaaatagaatttgatatcttggaatggtaatttggcggctttaacatttgttccgtgaattccaataattgttttggtagcaccagcgcggaatggatattcaacagcatcatcatatgcagcataagcagaagtcaatccgaattcatacttcacgtcattcacangcttagcaatagttcgataagtcatcaagttttcatgtccagttttcaatggtgtagctgttgttatcattacggnttacggtccagnttaccacng

SEQ ID NO: 801 - DNA, 166 bp, Ctenocephalides felis
acacttttaacgactaatggagcggagtagtgacttatcacaggggccgtataagccaaaggcgctacgtatcctgggcgagcaaaagctacagctacgagagcaaataaaacgaccagtttgaacattttgatttagttttgaataattctcaggaggtctgaat

SEQ ID NO: 802 - DNA, 266 bp, Ctenocephalides felis
  misc_feature (62)..(62): n = unknown
acttaataaaatatttaaaatttgaactctacttctcttcttaaaacttttcaaattaaaancatttattttagtaaactatgctcattactattaaatacacatatctaataaaatctgcacatgaaaagaagagcggttaaccgctgggttgctcccttgagaaatatctaggctatatattcaaagaaaaaaaattatagaacacgtagttctgatcgctattgatataaatatataaaataattgtaaaatattaacaatgt

SEQ ID NO: 803 - DNA, 499 bp, Ctenocephalides felis
catataatactaattataaattaaagtgtatggggttgcgttgcttctgggaaaaacatcgcaaggacccatacaccgaatgaaaaaaaataatttattaacgaaacgcgaattactagaacctgccgtggggggtaggcgacaggaacacatttaaacgcggaaatcgttttaaacgatattaaaattacgaacaagtcctcgcacgaacaaaaaaaaaattaaaatgtggacgcaaataactcaaaattataatttaacaacattataaaaaataattaaaaattgtcaatgtgattgaataaaaaaaattcatgcacaataaatccctaaagcaatccgccactgcgcaaaacactgtatgaaatctgaaacaaaacaaatgtagtcaatcgtaaatatttgaaacataagatttatattaaaatttaatattatttaattatatttaaatttaataatctgaagattgattaaattatttatattaactcaaagg

SEQ ID NO: 804 - DNA, 500 bp, Ctenocephalides felis
  misc_feature (17)..(17): n = unknown
  misc_feature (461)..(461): n = unknown
gaacaagaggtttaggnatgagatctgcaaaatttgggcaagatctaaaatcgaaggaaattattttatatgaatattttgaatgtaaaaaaatgtgttgaaaaatttatattgtaatggatggtttcataaaggcggtgctagaaacaaaattattatagttggttttaacatatattgcaagatatttcaaagatatttgtttagattatttttctacatttatttttcatgctcttatttatagaatcacgattacgataaaatgtctaagtttaaatattgagtctgctgatcttgagtcctaacttcaatatcagaattgttggtggcattgttgtagaagcacttctgtgaaagatcttttgcccatatgaatctgtggtcaatcaatttgcatgtgggttgcttataatttttcctatttggccaattattctttggctacgattttgagacanatcttttcggtatcaaataactcttgattcgaataatca

SEQ ID NO: 805 - DNA, 216 bp, Ctenocephalides felis
actaaagattctttatatttttaatatgttctcattgcacccgtttaatctagttcaagttttataatacacaaacatcttataaatttaagtataaaatctaaaaattatcacacaataaacgctagtctttcagagtaaataatataacccttaagactttgattcttaaattaatggtaatatcaaccacaaaatattggaaaagaaaatcgt

SEQ ID NO: 806 - DNA, 500 bp, Ctenocephalides felis
actgtaaatttttacacaaaatgcaaatatttaatatctcctataatttatggattaattctgccttatgtcggaagtcaaccggatcataaaaagtgatctaattgcgtaaaaaaattagtcacacttctgccaacgtatatcttggagcatcgttttattcacagatatggtgcaatcatttcaattatacgttggtagatcttctagtcttagtcttgtttttataatcatagaggagactggagaaaagaatactggaaaaccttactgggtgatggatatccacaatatcgttagcagatagtatctgggatagatttttggagtttttagtcatctagtaaaatattttttcactaatattaacaacatccagaataagaattgatcaaaaatttttacttcattttataataagtttgttagtaattcgtgataggatatatttttattactttgattattttttaataactttccttccattttaacaacgg

SEQ ID NO: 807 - DNA, 355 bp, Ctenocephalides felis
acaagaatgcaattattgttcttcaaaggaaaatgattgattttctacaccaacagataaaacagtctctaaaagaatttgtaaaacttgaatatttttttcggtgatacttgcaggaaccgtaaaatacaatcaccaccaccacctttagcttcagcattcttggtttttacctttttctgtttttaacacctgtgaactgccttttcctcgacttcaactggctcaacgatatttttagataccaaaaaatatcgtatctggataaatttgttgtgtctgcttttaatattttagactttcattttggtattaacattttttgtgagaacttttacttttactaagtcggggt

SEQ ID NO: 808 - DNA, 424 bp, Ctenocephalides felis
  misc_feature (18)..(18): n = unknown
  misc_feature (23)..(23): n = unknown
  misc_feature (31)..(32): n = unknown
  misc_feature (40)..(40): n = unknown
  misc_feature (63)..(65): n = unknown
  misc_feature (82)..(83): n = unknown
  misc_feature (89)..(89): n = unknown
acaagcgatggaccaccngctcncccgcctnngttggtcngtagtaaaagaaatctaaacctnnngttcttatttattaagnncattgngtaattcaacttacacctaggtaatttattaataattatccaattattaataaaaaaaattaatattgactacttaattacatttatatttgctaaaatagtatatttacatcaattttttttttcaaaggcaatataacagaaaaggctcctgataccatgatcaggcagattctttcagcttgtggtccagttgtttcttggaaacgggtttctgcatttggattttgtgaatttaggtgtgtattgtaatgatttattaataagacaaaaatgtctaggttattaaattacgaaattcattccagttgtccagaagctggtttaagagcagt

SEQ ID NO: 809 - DNA, 500 bp, Ctenocephalides felis
  misc_feature (58)..(58): n = unknown
  misc_feature (317)..(317): n = unknown
  misc_feature (338)..(338): n = unknown
  misc_feature (346)..(346): n = unknown
  misc_feature (359)..(360): n = unknown
  misc_feature (364)..(364): n = unknown
  misc_feature (366)..(366): n = unknown
  misc_feature (368)..(368): n = unknown
  misc_feature (374)..(374): n = unknown
  misc_feature (387)..(388): n = unknown
  misc_feature (390)..(390): n = unknown
  misc_feature (393)..(393): n = unknown
  misc_feature (397)..(397): n = unknown
  misc_feature (403)..(403): n = unknown
  misc_feature (412)..(412): n = unknown
  misc_feature (419)..(419): n = unknown
  misc_feature (430)..(430): n = unknown
  misc_feature (435)..(435): n = unknown
  misc_feature (447)..(447): n = unknown
  misc_feature (463)..(463): n = unknown
  misc_feature (477)..(477): n = unknown
  misc_feature (480)..(480): n = unknown
  misc_feature (486)..(487): n = unknown
  misc_feature (489)..(491): n = unknown
  misc_feature (495)..(496): n = unknown
acatcacagatttttttttttcaatatatatttcagtggagagaaatttatccaacangggggtaattttgctcataccagtgaaatatgtttattagcccaacttggcttcaaataatataatttttttaaaccttattcacatatttattatcactgtacgactttttcaatgcgcgctcgaacgaaattatgaacgagttttaaaaatatttttagcagctcttacagtgttggtatttgtaaatgatgatatttataaatttcaacagatacttgaagtacacagtcaataaaatttccaatttttcacaacnggttaaatttgcaccaccggnaactggcncccttgcaaaagnntccntntnggaaantaattggccgganncnaanttancttatntttttttcnggtccanaccgccctttnaaaancccttttttttngggaaaaaattttccngggttttttttttnccnaaaaanncnnngggnnaaac

SEQ ID NO: 810 - DNA, 298 bp, Ctenocephalides felis
  misc_feature (21)..(21): n = unknown
  misc_feature (37)..(37): n = unknown
  misc_feature (87)..(87): n = unknown
  misc_feature (98)..(98): n = unknown
  misc_feature (168)..(168): n = unknown
  misc_feature (171)..(171): n = unknown
  misc_feature (189)..(189): n = unknown
  misc_feature (252)..(252): n = unknown
ggggacatatctaaataacanccaaaacaactctccnttttgtttgtgctgggttgcaagcaagcggggactttagtcaaacgtctntcaaatgcttntaaatctttacacgcagcttgttcaagtgacatgtttactattttttgtgttacatgatcacataagatnatnatgccacagctaaaatcnttttgaaaaaataaacctggtatttattacacactacatcaatttacacttcaaactaacgtngcatttttattgaatatataacatgataagctaaactgaaaaaatg

SEQ ID NO: 811 - DNA, 243 bp, Ctenocephalides felis
  misc_feature (15)..(15): n = unknown
  misc_feature (57)..(57): n = unknown
  misc_feature (193)..(193): n = unknown
actgtatctttttgnctattcacaaaaagtatttgtcagaagtgggattcgaacccnggccctcatagaggaccagaatgctcagccagttgttaaccggcaaggaaaccttgagtatggcgccttagaccgctcggccatcctgacatacagcaaagctttgcaattgtctcatcagaaacatatttgctgngtgtaatttacgctaatacaatgaactttgtttgagatttttttacaagt

SEQ ID NO: 812 - DNA, 500 bp, Ctenocephalides felis
  misc_feature (29)..(31): n = unknown
  misc_feature (57)..(57): n = unknown
  misc_feature (59)..(59): n = unknown
acttcaagtataacccaacgattcacttnnntctgtgcactttggcataaatatccngnaaaatatgtaaaacaggaaccagggcaccgtgataatgtaatcaaacgccggaaaatgatttttgatcgtatccatacctttatagcgaagtcgggaatccttgtgattatattttcctaaaaaaggaaagaagttctcgcatactgaaaagaaaagttttgtctggtggtccgatttcgaactttcaaacttattcattcggttaccgcgaccgcgaatgaaatattatgatttttcttgctcttgtccggaataagatagattgacttcgaatattacggaatataagctgggctgcgagtaaattgtttgatttggggctttttattatcgataaaatatgtgctttctttgaagattgtttgaaacttctgtgttatcttcaagttcacaatgataacattaagcttaataataaatatgttagagcaaacaaaaca

SEQ ID NO: 813 - DNA, 500 bp, Ctenocephalides felis
  misc_feature (34)..(34): n = unknown
acttttcaaactatactggagagtttttttcttntattttttattgtaattactatcaatacgatcacctcgttacggtttgacgttgagttctgggacaccctgggtaaattatgttaattatatgtatttgagcataaatacatgtaaagcaaatgtattactgatagacttttgactttaactttacttgaattagtaataaaaccacatgatagaaaattattgagtttttttatagaaaagtttactgttgattttttttattaaatcattgcaatgtgctaattcacattcttcattactcaattttatgcccaactcattataatattttgtttttcttaagttttcatacctcgtatcagaactttctcaaagctcatccctagctttactttaacttccttattatttcactgataataagaacttttgatttttttaaacatatatctatcaagttaaagtttaaaatattcatgaaatgaactttgatg

SEQ ID NO: 814 - DNA, 285 bp, Ctenocephalides felis
  misc_feature (6)..(6): n = unknown
  misc_feature (15)..(15): n = unknown
  misc_feature (34)..(34): n = unknown
  misc_feature (37)..(38): n = unknown
  misc_feature (42)..(42): n = unknown
  misc_feature (45)..(47): n = unknown
  misc_feature (50)..(51): n = unknown
  misc_feature (55)..(55): n = unknown
  misc_feature (58)..(58): n = unknown
  misc_feature (62)..(62): n = unknown
  misc_feature (67)..(68): n = unknown
  misc_feature (80)..(80): n = unknown
tctgantattttatnaatatttaagacatgtgcnaanntgangtnnnttnnatanaanaatngtgcnntatcaaaacgtnactttttttttctctccaaaggcaatttttttaaaaaaaactccgattatccgaatatttgattatccgaatgggtcccggtccccattaattcggataattggagttctactgtataaaactttgtatatttttgaaaattttgaaaaaactattgatatttgtttcagccatacaagttagtttaaaaattaataatctcggt

SEQ ID NO: 815 - DNA, 500 bp, Ctenocephalides felis
actcttcttcgttcaccaatgaagtttgattgtgcatatcaaacttcctgtgtccaccatagccctgaattctttgccatctatggtgacacgtttcatatatttttctcctgtctgatcctttttatcagcaatccaaattatttcaccactaggatttttagtgtcggtttcaattttgatcttattacgttctgggcaatcctgaataaagtgtcctaccttcctgcatcggtagcatatcacttctctttttcgagattgttcactatcttctttaacctcacacttcactttcgtggtagttgcatttcgtgtctggctgcactcatccgtttcaagctttaagtcatttaaggcactttcatgagccaaaatgcttgtgccgagttcgtcataatcggcgtgcttctctgcagctaaaatgacatacagctgttgtctagcagccgtaagtacttgccgttcgttctcgaaactcatgcgtaacgcttggcaca

SEQ ID NO: 816 - DNA, 346 bp, Ctenocephalides felis
  misc_feature (36)..(36): n = unknown
actgcatgcgtagtttgcggaatgcttctttccttntagatatgaatacgtcgcattcttgatcccaccacacggagggtttgaataacgttctttttgtgatcttaatttttttttatattcttttctgccgctatttctataattcggattacatgttcgtatttaaaattctccttttctctagatataggcgattgtaacaatcgtgttatgtcttcagcacatccttgccaatttgctttcttgatgttccactttttgtggggataatatttatgtaagttaagaattccacacctatgtttataatgattagaagatggtcagaacccaatgcttctgt

SEQ ID NO: 817 - DNA, 500 bp, Ctenocephalides felis
  misc_feature (62)..(62): n = unknown
accattattaaaattattggattgttttatttgtgccactcttaatataaatttgcatgatngtagtatggtgtggatagtatattttatgtagaatttgagggtaactatgtatatatgcatcgataatttttcacgtcgacctccattgcatgtcaagttgcagacgttctgtttatgtcaacattatcaaggtaatcgcactcaactcaacaatatttccatatcccctttttgttatagctaaaaacaatttgtttattgtatttaagcatttaataatgtgttacaacaatagaaattgatttgatgtcttgggcttgccatcactaacagtgctacgagctttggcttggcaagcaagttctatactcatctgggcgaacttgatatcaagcagtagtgatatccgttttcacttgaaaacatgaattataaataaatttgcagttgaaatagcacttctgggaattctgcagaacgtaaaaatataatttcaa

SEQ ID NO: 818 - DNA, 500 bp, Ctenocephalides felis
  misc_feature (32)..(32): n = unknown
  misc_feature (61)..(61): n = unknown
acaatagccataaagcatgatgaaataatgtncacaatagtctctaagaattccattgttngaaggaaaagttgaaatattattatgtaagttaaacagagttatatgtgaagtattattttctggtgttaacattgtgagcacttcaatattggaattaccccatatacttgttatatattgtgcgcgtagaaaatgctcgtgtaattcggaccgacacggtggtgaatgtgatgcgttatgatttaaatattttttattaaatggcttgttcactttctttggtttataagtgataatgatcttattacatctcgtatcattaacagttctttaatttttcaataatcgggaacatttcactgctgctccctgttatataagcactaagtttttgaatacttcttggtattctaaatttgtttaacaattgtaaaaggtcgttcttaccttttaggaaaaatgatgggtatagcacaaccattagagtatgaaatttg

SEQ ID NO: 819 - DNA, 431 bp, Ctenocephalides felis
  misc_feature (66)..(66): n = unknown
accgataatctctcaagaaatgctaatcttttaagtgaaattctcaaccctttagttagccaaggngttgaagtattattttttgggcaaacggtttttttaatgagaggaaaagtttgattgaagttgaataaaaatgtagaaataaagttgtcgaacattgtatttgagtctttggacttgttaagcaaggtccatgattccttttcaagaagacatttgaaaatcaatttatttgattcatcaaaataacgtttgtgtaagataaaagtagatttagaagttgaaaaattacaaaaatttaatattatgcctcgatggtctgaaagagtggtatttataacacgcgaatcaaagtcttttaaattggtgaagaaattatcaatgcaagaagaagattgatgcgaaaaacgagtaggttcatgtatagt

SEQ ID NO: 820 - DNA, 500 bp, Ctenocephalides felis
  misc_feature (62)..(62): n = unknown
  misc_feature (64)..(64): n = unknown
actgaaaataacaaattttgaattattatagttttacaggtttattttatctaataaaaaangntagttgacattttcgaaatatgtgaaatatatttcaacttacggaaaattgcaaataaatctgtcatgggcatgacagtatatgtatatttagcagtatatgtaattgatttgtccacttttatccattgggtaacatcatatttaccaatatctctgctattctcacatctgtcaatagctgctccacatctagcagttctgcctctgtccgaacaggaaatttattataaactgccagtgtataatgaggcaaatcatccttcatatcacactggcatcactgcttattaagcctattcattaaaacttggtgccgtaatgaatcagcctttttattaatattgagtgcaaaatctgaacaatatacaaccttatactgaggtttaccacaatattctatcaaaggtccttcgaaatgcatagacatctcacaa

SEQ ID NO: 821 - DNA, 500 bp, Ctenocephalides felis
  misc_feature (338)..(338): n = unknown
  misc_feature (498)..(498): n = unknown
acaaatagaaaaaatacttatttttttataacttatataccatatgaaaaataataaaaactttatttgtttacgtcactatgctctatcattatttacgaaaaatttttatatgcttaaagctttttgttaataattttcaataaaagattcaactaaataattatataatataaataaaggatttaaagtttatttgatattatataagttattagaatgaaatctcactacataagataaaattcaattttatctatgtctcatcgaaatagttgtataattttgaattttgtgacgttttttattttatttaaatttagttatatttgaattgntagtatcatattccattaaccatatttcataggtatcaatacaacttttatattcatattatatatttaaaaaaaatgtttatgaaatttttaaataaatgcaatagcagaatgtattttcattagttataccgaatataggaaagccaggagcttgtgnaa

SEQ ID NO: 822 - DNA, 500 bp, Ctenocephalides felis
  misc_feature (65)..(66): n = unknown
acattaaaaatatttgttagagttaaatttgaacttgatgacagtgcaaaaaaataaatataaannatttaaaatttgtatgaattcaagttaaaatatgtatgaatcttaataattaaattttgtgagtaattatatatatatagataaatagatttttaattaatagataacaagtttttagaactacaacaattgtaggagaaggtgaacatcttaaggaccaagagcgaaatctttgaatatcagaaagaaatgtttcaaaatgatacgaaaaatgttttaaagttataagaagaaattaatcacttgaatttatttgaataaaatcttatttaaactccatttattaatactcatttccaattgaacttctcacgaaatttaaaaaaattgaatttattttattttaagttagttaagagttcatattactaaaagttaaatttcattatgtatcctttaatatgttcaccgccctccccataattttattaaat

SEQ ID NO: 823 - DNA, 240 bp, Ctenocephalides felis
actccatgtgtcataattctattattcaatatgtgcaaattacgttctaatataaatcgtgacaatatcataatatatttatcgtggaaataatatagcaattgcaagctaactaatgtctcctagcgtaggagtatttgtaaccgcgcggtatagcgtttccacttgggccatcatcggctgccaaatcccctccaagacctgctccggccctgccccatggagatcgtgcttcggcgt

SEQ ID NO: 824 - DNA, 500 bp, Ctenocephalides felis
acctaaatttcaaaattgatttatataattctatatcctgcgtgtcaaattaaatctatatttaatacctaatatttaaaactaactacgaatgaattcagtgtttcatacatacataacatctctggtttctagtatactattgttagtataatcagaaccactataaaaaaagtcactataaaagttgaaaacctaatttctaatgactattatactagagcacatgataagaatgcagaagcaatataaatctatctttttgtaataaatttctatactattactattacttttcttagtggctcgtaatatgcaaacaatcactgccaccgcagtaacttcagccgtaatttatggcacatcactgccgatatgataattttctatgcttttattactctgaaaagcgtttcgttttggccacggtgtcggttggaaaattttcatcggtggaaacttgccgtagacgtcctcctgctgctccccccttccacacg

SEQ ID NO: 825 - DNA, 370 bp, Ctenocephalides felis
acttgaaaattactacccttgtagagagctagcaaagagtttggtgggactaattgtttacttccaaaactccgcataagaacatttgcaataaatgatcaataaatatatcttcttcaattagatcttagtgataaattaatagtgtaattagaacagcaccaaatacataaattatgccaataaatcagtgtttcacacagcactgctacaaaggttaaactaacctagcgtcttgagttaatcggaggagagactcaacacttaatcttgcaataatcttgatatgatattgtgatctaagcaataattttatcttaagataagaactttttcaccatattatggttagcttaactgtattgtcagt

SEQ ID NO: 826 - DNA, 166 bp, Ctenocephalides felis
acaaaaaagttaaaattttaagaattagcagttgtttaagtgtggcatcaaaaagttgtcacgtgaccacgcccacgattgcaaaagaaagggtgaagaagagggttatatcatggccgaacagcgataactcagaaaataattaaatctttaaaaatcctcgcgt

SEQ ID NO: 827 - DNA, 304 bp, Ctenocephalides felis
  misc_feature (37)..(37): n = unknown
  misc_feature (66)..(66): n = unknown
accggtagaaaaattgttgataatgtgcgcattactnattcgattttcaatatttgcgatgaccantaagtttggtaggttttcaaggaactctcgtcgtgaaaatactaacattcatgttacaacacatagcaaataatatataaaatgaagtttgaatagcaaatactagaaaaaagacaaaatactggtttacatgtatcaaaaagcgtatatttcatacaaaatgtatgggtggtctagacagaccactccgaccgtttggagtataaaaaagttaatatctttataattatacttttgt

SEQ ID NO: 828 - DNA, 352 bp, Ctenocephalides felis
  misc_feature (36)..(36): n = unknown
  misc_feature (102)..(102): n = unknown
  misc_feature (135)..(135): n = unknown
  misc_feature (242)..(242): n = unknown
  misc_feature (308)..(308): n = unknown
acgggaagttccagcaatttgccttcaagcacgatnccatacatcactagttttttttgtttatggggatatattactttcgattattactaaaacaacagntataaaactttactattgctaatagaacgaatntttctgaaaaacgtgatatgggttaaacataggaaattatagtaaattattcatgagagtatatcaataagtcaataaatatttgtcttctgaatctttttacattnggctctggttaaatttgcttactaaatatagaatttttagctttataatttatctatattcattanatccggtccaaaccataataaatcagatttgatacaagatacgt

SEQ ID NO: 829 - DNA, 500 bp, Ctenocephalides felis
  misc_feature (472)..(472): n = unknown
acgttgcaaaaattaagcaaatcaagactaccgtatttacgaatatgtccccaattcgctgcatacatacacacatacccgcacactagtgattcgtgctctataaatatcgtgcgtcattgatagaaaacaagtgtatctataagctttgacattatattacacaaatgatttatcgtagatgaaataaaagaaacatctgattctctcattactaccatattttatggatatgggaataatggaaataagtaaaaaaaatcatatattttcttgctaaagagtagtcatttcaaactcaattattagggttaaaaattaaaaagaacatataccgtaattaggtcacaatattctgtggtcatcgccaaacttagtaacaccaaaaacaccactaaatttaagcataattgagaataaaagactaaaataattcaggtctacttttcctaatgcgtgacactcacggaanacgttcaatgcctcaatgtgtgacttaa

SEQ ID NO: 830 - DNA, 500 bp, Ctenocephalides felis
ccttaaatctgtatcttaaaaacatttaagtaatgcatttttaatattttgacataaattattaaagaatcaatagttttaatatataatatttgacctagccaaaaaccagatattgtttatctgaatccaggtattgtagttggctttttcttgtgatgtagtttattacaagtcgtttaaaaattgtattggttagctattttcaacaatcttatttgaaaatctgctttgttagcgaattacagagttaaaactattatattttcacttgaaggcatattttagatgaaaaaaattttaggtgaaagccaatatcagtaggggagacaatagatcacttttcttcttataattaatgagtcatcatcacgagtagttttgttataaatttttttttgaaatcagtcaaaaatgttaactactaatcatcagtttactaatcagcaaaatattcggtaatttaaattatatactgagactagtcgaatcatcattat

SEQ ID NO: 831 - DNA, 550 bp, Ctenocephalides felis; identical to SEQ ID NO: 101

SEQ ID NO: 832 - DNA, 550 bp, Ctenocephalides felis
  misc_feature (2)..(2): n = unknown
  misc_feature (8)..(8): n = unknown
  misc_feature (454)..(454): n = unknown
gngtgctnttggtgactgtgactgtactcgtactgtcaacatacttgaagtatgcagtttcatgcaaacttctacattgtcattctcgaacccaaatgacttacctattgttttctttaagtaaaacaatgattgtgctaaattagcaaaagcgttcaaattttattattataattaggaactgttgtttttagtgactgttattatccaattctaatcaaaaatgacagacacacctgataatgcccgaattactaccatggttgaagatgtttttgcaataacattaaacccagaaaaatttgtggactgtgaacaaaaaccagattatattcaaatgatttatctagaagaactagcagaaagtttgaagccgcaaaaacacattgacattgagactttagaacaagctctttttgaaaggttgatgctaacaaatatcacagaatttgtntaccaaaatccagtaagcccccatatatagattatgtagttcagaataaagcaatttctattaaatctgttatgaaagacttagaagtacatgctc

SEQ ID NO: 833 - DNA, 550 bp, Ctenocephalides felis
  misc_feature (2)..(3): n = unknown
  misc_feature (7)..(7): n = unknown
  misc_feature (502)..(502): n = unknown
  misc_feature (505)..(505): n = unknown
gnngctnttgaaacagatccgaacaatcgatcgatcggagcagatttttttttgataatagtaataaatgtgtattgttgtggctgaagtggattaaaataaaattaataggttgataataataataagttttaaatttgaaggttatccattacaatgtgtaaaatttttttgctaaacaaataattctagaccaaaatctaagtgcctatcatataggcacggactatagaccaaaaaatacaaaatgtttccaaaacattatgattgttcttaaaaacaaattgtggacttttagttgaaaatgaaatgtgatttaaaaattgtcgtccaaaaatattggtagtagtgaatgttgattgccaaaaacagtagctggaaaatagtgacaaaaacaaaggttttggtagtgtttttatttgcaaaatattggcgtccagattgtgatgataaaattgatagttgagttgacatagttgtgtacaattaataaaacaaagtngtntaacttcaagacttgctgctcttcacaaatctgattgaatataat

SEQ ID NO: 834 - DNA, 550 bp, Ctenocephalides felis
atcgtacgcgcgatacggcgacgtccgacaatattacgcatattcaactaatttattcatatcataaccaaccgttcagttcaaactaaactaaactaaaataaactaaaccaaagcgaaagctaacgactaacggggaggataagcggggggccacgaggcgaccccagtttcattttacatgtgtgcacgtatgcgaaataacagttcgtcgacaagacgttgtacgtccgccctatagtgaaacacgaaaaacctcatatccgatgggataaaatcgaccgaattcagcggacgactgaagatcgccgcattcaacgtcctaaagttaacaacttagcatcagttgcggcgcggtgagagtgcccgcgataggacagcgaagcgatgatcgatcccagttcgtctgaagaagagagcgaggaagagcatggaggaggcggcggaggcgtcaagcagcagcaccaccatcacagccggcagcgcgccgagcggagtgcttcgtcacagcgaaggcaaccatacgctcaccggcggcagtccggcacta

SEQ ID NO: 835 - DNA, 550 bp, Ctenocephalides felis
  misc_feature (548)..(548): n = unknown
gacagtttggttgtgtcagtcaacacttcaaaagtcagccaatgaaatttgttttatatttgattggcgttcattcgaattttctttgccgaaaagattagtttataaattaaacctatttgtaattgcttaatgcttcattgattgttctgttcatcttaaggttattttaaacatctaacaatctggtttttggtaataaaaatgcctagattgtctagattaacttgtgctgtggaggattgcgagtttagtacatatgatagaacaataaatgaattacgcagagttcagttttttgcattaccatctggattctctaacagagatcgtaggtcgaagtggattaaatggctcagtgatatcaatggtgaaaattgggaggtatgtaagtattcacatgtgtgctctctacactttattggtgggaaaccttcaaacatgcttttacatcctgatatgctccatcaataaagactcgagatgattatacccattagaagaaaagatgcctggcaagtttgaattataaaagcaaaaatgcaatnta

SEQ ID NO: 836 - DNA, 550 bp, Ctenocephalides felis
tgcacgccatcaacgaccaccacgaaggggtgtcatgcgtcggcacggatggctcaacggcaaactctcgcttgctgtcgagcactgtaagatcgacaccggtcgttctcctcagcacggacggcggacgagctcgtcaatgtaatgacgtagcagcggacgctgcagtccagatacaaacagcgacggaggatgccagtcatcccggccaaaaggacgaatggttcgtctaacaagtaggatcaaacattggtcgcagggcgatgctcatgaattggaaatctcgctacctatgacaattccatgaatgaaaatcagttgcacattttattcataaataaatatagataaacaataaataaaacgatttaaattagtatacactgtttgtgttttactttgatatgatattgcattatataatatatttagcaacccaatttgataggtgtattttgttgaatattttttcagatggtgaaagatattagataaataaaataaaactaaattattttctcaataaattattacttcacacaaatatttc

SEQ ID NO: 837 - DNA, 550 bp, Ctenocephalides felis; identical to SEQ ID NO: 93
  misc_feature (527)..(527): n = unknown

SEQ ID NO: 838 - DNA, 550 bp, Ctenocephalides felis
atgacagccatataagctatcataattaaaagtgcttttaccgtttagtattcttttagaatattaactaaacaatcatcatgaaattctacggtttaatgtttgtgttgtgttttgcaactctttccacatgtctaccagtggacaaatccgtagaagttgaggttttcagcagtgaaagcgaaattctgaagaagtacccgcaagccaagcccgctgacaagacccacattgatgatggtaaagctacttatgaatttggggagagagtacaaggcgacaaattgatggtcggcgcaactgatgtatacaacgccccaacccgcaagatgttgccctgaaattcaactttcccggaaaagtaccctattccgtcacctacgcctctgtcgaagtcctacaagattctgaggtcggacaggctttcatcgtctcggaggaatcggccaatctgaaatccatttggctgttgtagctgcaaaattaagcaagtcaatatcctacgaaatctacgccatgtctcgttaaatcttaatgactgaatcgtcgc

SEQ ID NO: 839 - DNA, 549 bp, Ctenocephalides felis
  misc_feature (543)..(543): n = unknown
aaattgacgagtcaagaagaactactgccattaaactataagaaatgtgaaaattgttgaaaagcagtgacttttataaaatatcaacaacaattctgtgtgccatatgtgccaatataaacttatttttgtatgtttgtatttaatatttatttaaaaatttagcgacacgaaaaaataagaagcaatattattgatctaataaacaggctgcttaaaaatacctctaactacattagtgattaaattataaattagcaattgcgaaagctttttataatactaacaaagatattaatgtggcagctgaagtaaatgatacatctggtagctaatatactgtgatgattatattttgcttattacaaatgttattaaattgtatattattattaatgagtaccaatttgtaaataggaaatatctttattcagcaattgtgtggaaagcatagtcaattataaatatctataaaattattgtattgtaaatctaatgactaattataataatgtatgaatatgaagcaatctataaatttgngcctcg

SEQ ID NO: 840 - DNA, 549 bp, Ctenocephalides felis
  misc_feature (481)..(481): n = unknown
aatcggcacgaggtttaaaggtagtttattaaatgtgagtggtgtttaaatttattaaaaataacgatcaaatctaagttttacaactatggctgctgatgcaagaacttattcgatatgtttgggtgtaacttgtatgtttgcttcgattttgtcggcgtacgcacttcttgtggaactttcggctgaacttcatcctgatcaaccagccatgtgcgatattggtgaacatatgagttgcagtagagtgttgacatccaggtatggcaaaggctttggaattgttggtctaatattaggagaaaattcaaaattcaaccaacccaacggatttactggcattatcttctactccttcatttctactttagctctcatagagaaacgttggacagcaaaaattcaattagctttaagtttcatatcgattcttctctcaatttatttggcatgtattctatattttgtcttcacgatttgnggtagtttgcgtaccatttacttttaaattaattaattcatacttcctataaaagacacagttgtagc

SEQ ID NO: 841 - DNA, 549 bp, Ctenocephalides felis
  misc_feature (1)..(1): n = unknown
  misc_feature (4)..(4): n = unknown
  misc_feature (6)..(6): n = unknown
  misc_feature (22)..(22): n = unknown
  misc_feature (24)..(24): n = unknown
  misc_feature (26)..(27): n = unknown
  misc_feature (44)..(44): n = unknown
  misc_feature (58)..(58): n = unknown
  misc_feature (76)..(76): n = unknown
  misc_feature (81)..(81): n = unknown
  misc_feature (85)..(85): n = unknown
  misc_feature (89)..(89): n = unknown
  misc_feature (101)..(101): n = unknown
  misc_feature (108)..(108): n = unknown
  misc_feature (115)..(115): n = unknown
  misc_feature (122)..(122): n = unknown
  misc_feature (135)..(135): n = unknown
  misc_feature (138)..(138): n = unknown
  misc_feature (140)..(140): n = unknown
  misc_feature (149)..(149): n = unknown
  misc_feature (167)..(167): n = unknown
  misc_feature (173)..(174): n = unknown
  misc_feature (177)..(177): n = unknown
  misc_feature (181)..(181): n = unknown
  misc_feature (188)..(188): n = unknown
  misc_feature (193)..(193): n = unknown
  misc_feature (207)..(207): n = unknown
  misc_feature (217)..(217): n = unknown
  misc_feature (219)..(219): n = unknown
  misc_feature (227)..(229): n = unknown
  misc_feature (240)..(241): n = unknown
  misc_feature (250)..(251): n = unknown
  misc_feature (286)..(286): n = unknown
  misc_feature (292)..(292): n = unknown
  misc_feature (294)..(294): n = unknown
  misc_feature (320)..(320): n = unknown
  misc_feature (325)..(325): n = unknown
  misc_feature (329)..(329): n = unknown
  misc_feature (331)..(331): n = unknown
  misc_feature (347)..(347): n = unknown
  misc_feature (352)..(353): n = unknown
  misc_feature (356)..(356): n = unknown
  misc_feature (367)..(367): n = unknown
  misc_feature (375)..(376): n = unknown
  misc_feature (380)..(380): n = unknown
  misc_feature (382)..(382): n = unknown
  misc_feature (386)..(386): n = unknown
  misc_feature (401)..(403): n = unknown
  misc_feature (406)..(406): n = unknown
  misc_feature (413)..(413): n = unknown
  misc_feature (415)..(418): n = unknown
  misc_feature (420)..(420): n = unknown
  misc_feature (423)..(423): n = unknown
  misc_feature (427)..(427): n = unknown
  misc_feature (433)..(433): n = unknown
  misc_feature (439)..(440): n = unknown
  misc_feature (444)..(448): n = unknown
  misc_feature (453)..(453): n = unknown
  misc_feature (455)..(455): n = unknown
  misc_feature (458)..(458): n = unknown
  misc_feature (464)..(465): n = unknown
  misc_feature (482)..(482): n = unknown
  misc_feature (499)..(499): n = unknown
  misc_feature (504)..(504): n = unknown
  misc_feature (508)..(508): n = unknown
  misc_feature (512)..(512): n = unknown
  misc_feature (514)..(516): n = unknown
  misc_feature (518)..(518): n = unknown
  misc_feature (526)..(526): n = unknown
  misc_feature (531)..(531): n = unknown
  misc_feature (542)..(543): n = unknown
  misc_feature (545)..(545): n = unknown
  misc_feature (547)..(548): n = unknown
ngtncngcaccagatttggatntncnnctgtgagaaccatggangggcaattgatcangtcaacttggtgggttantatanggantacngcatctaccatnttcgccngtttaanaagaacntggcttgagtgantantnaataacagnctaacctgcccctacgangatgannaangccntttcaanttcantgggcggaaggtancagacatatncncttttaannngaaagctgganntgaatgatnngcatgaaatatgtaactggcttacgtgacctgttntactancntaattgttatgcaaaaagcgtctttnttatnaacngncaacaagacctttccnttatnnatntcactatagancaattttnngacnangacnatgttgatttttctnnncanatcctanannnncnttngganacattntgtagnntttnnnnnatgangncanaattcnngagtcgatgttctccantatgtttcaacgatttntcctntacntatncnnngnaacatttncaggnacaacctcagnnangnnc

SEQ ID NO: 842 - DNA, 549 bp, Ctenocephalides felis
aaaaggatagcacagattgtgcaccagagaaggacagaagatcaggacaacttggtggtaaagcagagttaggaaaagatttaccatgatggttaatggttgatgaaagtggtttgagttgttctgagaacaaggataaaggataacagggttggagcaattttttttgcgaggacaatgatggttattcaagtcatatgctacatcattgttattcttttttttgtcttcagccagaaaaatgtaaacaaatcacgtgaccaatttactaccaaataatttttacaatttctgccttcgatttaaacttttagccaggacacaaacctttagccaggacactaaagagcaatttttttgcgaggacaatgatgattattcaattcacatcctacatcatcattgttattcatttttttgctttagcaaaaaatgtaaacaaatccgtgcgattttactaccaatttatttttacaatttctgcctctactgcgagattaacttttagcaggcacaacctttaccagtcacaaccggttgaattttgaa

SEQ ID NO: 843 - DNA, 549 bp, Ctenocephalides felis; identical to SEQ ID NO: 116
  misc_feature (503)..(503): n = unknown

SEQ ID NO: 844 - DNA, 548 bp, Ctenocephalides felis
aagcacgtgatataaaaatgaatatttgaagttatgtgttatactcatacctcaatttgtatcgtgcttacgtccaagtgaattattgactgatatgtctatagtggcttctatcatatttagagtattttgaagctttggcggtatgaagtaagtagcagtatgcggcattctggtctaaagcaactttttacctcaaaacaacattttacttcgactctgactttgcagaactgaatggtgagtcaatgagcgcaccacgcttaactagttaaggaacgatgcaacttcgaataaacgcaaaacgatgcaaagtgaggtatgggtgtctacatttgatgcgatataatataatattttgtacgtattcagaccgcacgtgaagagctaaccgccaggctctgcgtctggtgacgtccagcaaattgtagtgatatcaatgtccgattcatcattaactggctaccagacatctcgcagcagtctgacggattaccagcatcactgactcacccaatccttgcgtcacaccactctcattcaaccgt

SEQ ID NO: 845 - DNA, 549 bp, Ctenocephalides felis
acgaactgaaatcaactattaataaaatatacctgtatcttttacctgtgacggttctatttgtgttgtattttgacaaatacagtttctgtttgcgatcgaattatatatattataacgagaattgtgtcataagtagaagaagttagcggccaagatgtggcgattgttgggagccgttcttgttctttctgttgtcaacagtcaagcccaattcgaggaccagttcttgagttggaggcgagatgtaggtgccaatcgtggaagcgtttggcctggaggctaccaaaatgtttaccctcataaccagaggcatgttcctaaaaaaacacacaaggaagaagaggctgtcactgaaagggaccgtgaaccacttgagcctcattcaaattgggcaggtcgcagaacagccgatacatccgacatcgaacaaatcgagactgttcctgaattgctgaaaccagtgacgaagatagtcgtctgatgtcgattcctggtgccttctctccttggaggactcggaggatttctgtgacaatggcatactct

SEQ ID NO: 846 - DNA, 481 bp, Ctenocephalides felis
  misc_feature (475)..(475): n = unknown
ataaagcttaattattttttgggaaaataagtctctacggccacagtagttttatttgttgctgtgagcagtttatctttatactattgagtgtttagaaaaatcacaactaagtcataaaagccatagattctactttgatagtgttgatgtagcttgataattttcattaatcaaaatcagattaaattttgcgaacgcggtgtgttagtaaattgacttcatattgatatggaatccaaagaatataaaaattaaacatagaaaagcaaaatttgggtagtctttaaattatctgaaacaatagttagtgttttgttgtttaatagaaatgttagataaaatgaaatacgaaattagtattataaaattgatgaaaatatttatgttgatatatttgggaactataaatgtgctaaaggtgtaaactattgtatgtacatgtgcaagatgttaaataaatagtatcattgtnaaaaaa

SEQ ID NO: 847 - DNA, 548 bp, Ctenocephalides felis
gaagatgtcgtggaagacaaagctacattgcgcgaagctgtactgaaaacttgggcacaactagttggcggttgtctgatatttcgttatgtacaattattttggtatttggagctttctccaacgcatacaggaagagcatttgaaaactgcacggctgatttacaggtatctcctatgctaggaacggcaatagaaggaattgccacgtgcctatgccggctgacgtcgaaagtgatctctcatcacgaacccagatttgccgcggccttagattcctttgtaggaacggcacttgttgtggctgcttttaattactcgggtggatatttcaatccagttctagccacatctttaaaattcggctgcatgggacattccgcttgggaacacgtgattgtgtactggttcggtgcttgcgccggacacttgcagcagttgcgttgtggaggattcccaaattagaaatagactaatcggtcgaaactaaaatcagcgtaatcaaagcattagtcatatcgatcaaacaaatatacaaaaataagaaa

SEQ ID NO: 848 - DNA, 549 bp, Ctenocephalides felis
  misc_feature (511)..(511): n = unknown
gaaactacaaaatagtgctcaacacaatgaactccttcgttacaactgttgccatcgtcctccttgcaggaacttgcgcccaaggtgcaacaactgtgctctcctctaccaatggcaattaccacggcaactatggatacccatctgtcttatcccaaggtttcaacaatttcaactcattcccaactacttacgatcactacaacactggagtagtcgatactgttgtttcttctcccgtcgttaaatcttcagtcacaacaactcctgttgttgataccgttgtttctactccagtcgtcaaatccactccagttgttgcaactccagttgttgaaactgttgccacaccagttgttgcaaccaccggttataccaccccagttgtcgcaaccaccggttacaccactactggctacaccactccagctgtatcgactggatacaccaccactggatataccactccagcagttgcttccactggatatactggttgggaagtatcgtntggtttgggaggatacgatttacacatctattcaagga

SEQ ID NO: 849 - DNA, 549 bp, Ctenocephalides felis
  misc_feature (446)..(446): n = unknown
ggtaaatctagtaattattcgaagaatttagcaaaataataatttttgacaaaatggcggcttcttaaaaaaatcgttttttggcgaaattttaaccttaaattgtttataaaaataaaagtatttatcggatcgcgaaaatctttgattaaccactaaaaaatatattctatgcaaatcctattattataaattattataagactgttcaaaatgtttataatatgaaaatataagagactctccaccgattcggaaacttctaataactccaaccggtgttgtctgcatcccttcttctatctcaacttctttttcggcatatgaattaagaaaacactgttataaaatttagaaagcaatactaaacagtcgaatcacatgcaactaaaatttcctgttgtttattaagttttttcgcggatacttcttccatctcagccgtnttttcttttcaaattgcgaacttgaaatattcccagaatgagggaaatttctgtgtgcattttaaatatatgacatcagaaatcttttttggaaactactgtt

SEQ ID NO: 850 - DNA, 549 bp, Ctenocephalides felis
  misc_feature (2)..(2): n = unknown
cncgcttatcgcatctctaacaaattcgcaaataataatcaatttagtaattaaaaaaaaacaattgcactaaaatcaattcaataaacatttacgaaacgcgaattcttttaatccttagtgtgtgtgtctgtgtacaataattcttgttaacaattacttattattgtgaacaataaaataataagagttaatataaacattttgttacaaatagtttaaaacaattctaattaaataattcgtctcgtcctatcgggtaacactatcaaggaatgctttgcacaaacttcacgatggtgctggtgctggtggtcgctatggtgacggtgttgccagatggtggtgacggttcgccgtttcttgatcgattgttttcggggtacggattggcacgagcctcttcgaaacaaatcacaggcccacaaacatccggaacagctacgcccggagctcggcaaccggagatcgtcgaacggcccggaggcggcgaacttacaaacagatttgcaatgctataaatccaagcccctacgcagccctggagcg

SEQ ID NO: 851 - DNA, 549 bp, Ctenocephalides felis
  misc_feature (12)..(12): n = unknown
  misc_feature (22)..(22): n = unknown
  misc_feature (27)..(27): n = unknown
  misc_feature (62)..(62): n = unknown
  misc_feature (64)..(64): n = unknown
  misc_feature (87)..(87): n = unknown
  misc_feature (98)..(98): n = unknown
  misc_feature (107)..(107): n = unknown
  misc_feature (118)..(118): n = unknown
  misc_feature (219)..(219): n = unknown
  misc_feature (239)..(239): n = unknown
  misc_feature (296)..(296): n = unknown
  misc_feature (303)..(303): n = unknown
  misc_feature (326)..(326): n = unknown
  misc_feature (377)..(378): n = unknown
  misc_feature (388)..(388): n = unknown
  misc_feature (404)..(404): n = unknown
  misc_feature (419)..(419): n = unknown
  misc_feature (457)..(457): n = unknown
  misc_feature (492)..(492): n = unknown
  misc_feature (508)..(508): n = unknown
  misc_feature (515)..(515): n = unknown
  misc_feature (530)..(531): n = unknown
  misc_feature (534)..(534): n = unknown
gaacaggagatnttggaagcancactnatcatatggacatgtgggtccaggagaagtctgcngngtgattttaaaagtgggctccanagaatttgtangagctggcnacacgccccangctgcccggcacgatgctgcttctaaagctcttgaggaattgaagaatcttcccatgccagatggaacatgtcctgctgtgcaaggcgatcatgtaactgntccaatggaggatgatccanattctgaattaaaatcacctatatctcttgttcatgagatcgctttgaagagaagtntagctgnacacttcgcagtatccagtgaanagggtccaccacatatgaaagtttttgtcacaatttgtaaagtaggtgatnngcaaactganggagaaggcccggacnaaaggtatcaaagancgtgctgcagaataaatgcttgaggaactcacaaactngtccgattatactaaacagacctgtggagcccctntgtgcgtactagaatnaaacgcnacctctgtccaagannagnaagaaatctgtaaag

SEQ ID NO: 852 - DNA, 549 bp, Ctenocephalides felis
aatacatttgatactcaacccataacttccataaaatttatacatttttctatatcgacctaaaacagttgagtagacgtggaaaaaacatcttttagtacttatgagtagatattgttggtaacaactaaaatctaaccaatgccattatcaattgaatttatacgaatgactttggattttgaaaacagtgaataaaaatttatagttataaaatcaacacctttaaaattttgatatttgtcaataaaataggcgataaggtatttttatctgtcttatgagtatctatatcaaaaaatattccaaaaaccacttttggaattttgatatttgtcaataaaattattattaagtttactatttactggcatttttattaagttattattttatgcagacatgtaaattaaaacgattttagcaaaatattgttgtgcattacatatcataagattaatattgttaaaaatgagttttactgagaataaataactttgaagcataatgtttattatctcaaacattatctgggtaattatatttctc

SEQ ID NO: 853 - DNA, 548 bp, Ctenocephalides felis
ctggataccatcattttagttatgtattcataaaaaatcatatttattgacgaactgtattgttgatagtaacgttagctagcacgatatcaagcaaaattgaggtaatgaagcagattttcctttggtttttcatattgtaggattgagttcacccaaatctatatcaaattatttattagtatttttcgtagtctttgaaagacgaatttggaatagatttatatttaaatgaagtgaagagaagttttttgattgccttgattgttgaaatcaaaagctttctccaactagtgagtcctatattaaatctgtttaattgtccaatatttatattttgaactgtcatacaaccttcatatttttctacttcacttgaaatttatggaaaatatgattttaaatgaaaattactttttaggatgccgcgattaaaaatcgattgaaatctactctctcaattttttattatgtatatatttacttcttgacggagttctatattcaattcctatgaatcaaaaagtttatatcaagctttttataga

SEQ ID NO: 854 - DNA, 549 bp, Ctenocephalides felis; identical to SEQ ID NO: 121
  misc_feature (526)..(526): n = unknown

SEQ ID NO: 855 - DNA, 549 bp, Ctenocephalides felis; identical to SEQ ID NO: 80
  misc_feature (523)..(524): n = unknown
  misc_feature (546)..(546): n = unknown

SEQ ID NO: 856 - DNA, 549 bp, Ctenocephalides felis
  misc_feature (505)..(505): n = unknown
  misc_feature (512)..(512): n = unknown
acaaccagaaatattgctttcgattaaaattaaatatataataaaaaaagaaattgattttcttgtattttaattactaaaaatgaattttagcatggattttaaaagaaatgaattacaaatttgtaatggatgtatttaagcagctaattcgttgaactaaaaatgaaaaaccaatttttgtcttcttcatttatatatgtcttgactcttgatatttgtcatcattctcaatctaaattataatttgttttgcacaatgaatacaattataaacatattataacatttagttgaaactacttactactacaaacataactattattttaaaataaaatatgaatattttaaaatagtaattgttgctctgtttttcgttaattaaatttttcacattgaaaaaatatttgccatttatatttaaattatgattttttaaaagtaatgtgtaattttattgtattatttgaatataaatttattgaatgatgcacatatcagngtcaaancgcgtaagagatcaaaattatctgcatttaaatctga

SEQ ID NO: 857 - DNA, 549 bp, Ctenocephalides felis
  misc_feature (547)..(547): n = unknown
attagcagaaagctgcaagatgttcataactaacatggaaataaaatatcgtatagagagtattgtcatggatatgtatatatgtcttacacaatgtatagataatttaacatgcaaagactcacagacacctattcaactgtgtcacgcgttcaaaaatggaatgaaagaaattgcaatagcttgtgctcattttctagaactctgtttagatttaaaaatcaactgcaacaatttgcatacattggacagacatgcaatattacgatatgcttttaatttatttcctacatttgtcaaattattatacaagggcttaaaatgtgcatgggactcgttcaaaacattatcaccttctcataaacaagagctcgctcagtatgttattcctgaggtcagttaaaatatagttgaagcagagtcaacatctgaaggccaagccggtcgaaagttatttctcgaaataaatgtgattatggatataatgagttgctatattgaaatactcacagcaaaattcttattaatgctctatggaatgataaangg

SEQ ID NO: 858 - DNA, 549 bp, Ctenocephalides felis
gttgcgtgtaaattgagtatgtcatagaccttattataatatacattattttgtaatttacatattattaaaatattcatatgtattacataagatcttttgtggtgagtgcgtatgttgtatgtatgaatatcaagagcttggttcaaccgatttgaatgattctaaaatagaaaatgtagaaatatgtagatagtggtgtgtgggtatctatgtacgtatgtgcggatacaatgttttgtcgactttttcaagagcttggctcaaccgatttgaatcattctagaaacattttacttgatagaaagatgtaaatagtggtgtgtgtatatttatgtatgtatgtgcggatacaatcttttgtcgacgatttcaagagcttggctcaaccgatttggatcattctaaaaacattttacttgatagaaagatgtaaatagtgatgtggtatatctatgtatgtatgccggattaatcttttgtcgcggttcaagagcttggcgcaccgtttggatgatctaaaacatttacttgtagaaagatgtcata

SEQ ID NO: 859 - DNA, 549 bp, Ctenocephalides felis
  misc_feature (524)..(524): n = unknown
  misc_feature (542)..(542): n = unknown
gagaccactttcattgtattcttcagactattcttcagacctacctctcacctactctacggttcactcagtgcctctctatggagcccccctggtacacagaagtgtcatcgttcaacgacctgtgtcggtgtacacaccatccccgatgtccgtggttattcgcaccaggccatcagtcctggaccgtgaattcgaccgcatccaaaggcgcgtcaggcccaccacctacaaaccagtagaagatttcttaaacagcagcagcacattggactttgacgatgaaacaagaaaaatccgatctcaagcaaactcacttttgactagaatacacactcccgtacatagaccattgaaaacgatattcttcagtactgctggaggatacggatcaataactccttcttaccctcatttggaggaggaattatcccacatcttccaacctctgagcaactaccgcaaaaatatcggcctggtcatttggcatgcgtacgatccgcagcgacaagcctcaacaagangaatctactaccagaagnggaaaat

SEQ ID NO: 860 - DNA, 549 bp, Ctenocephalides felis
  misc_feature (42)..(542): n = unknown
  misc_feature (520)..(520): n = unknown
aatctacgtactttcactaaattggaaaacatgaaagtaaaatattaagcgagttttgtaaaaatctagaattaaaatttttctaatgtaatttagtaataagtataaacatgaagagaaactaaaaaatgccccttaattttaggaattataaaatgtaattaatgtgattgaataatttttatataaaaaagctaactaaataactgtagtagatattattagaactttaagatgtcaatcactcgaaattatgatgcaaatgtatgtaacaataagaatgatatccgacgttttgttttctaaaaatttgcatcatgatttcaacatttgacgtaagtgataaaaaattcctaattattcaattactgctaattagaaaagagaattctcaaacattgctttttccgataggcaaaacatttttcttttgcaaagcttagatgattttttaatggacagatgttaatcatttctagtcgtaaacgataaacgaaatatttcaaataatttgtattcnttaagaaaagtcaatataatgnaattcaa

SEQ ID NO: 861 - DNA, 549 bp, Ctenocephalides felis
atagaagcaaaagacatcaagatgaaattggcgattgtatttttggttttggcagtagttgccttggctttagctggtgaagcaaagcaaaatcagcgtaaacatgggcagaggtcacttcaaaatgctggacacaaaggagctgcaaggaagcaaaataatcatagtgcatcagccaaatttttgtccaggaatcgacgagccaatcgaaatgaagaggcaacagcaaatgaggctgttcatgatatagatcgtgaaccagaacatgaaggaggtgctgaacctgtagaagatcccgatcatgaagtagtcattgatggtgatgtagaagatcatgaatctggtgtcgacggatattctacaaataatgattatagtacttacaacgcagaaagtacgaatgatgctattgaagcagcaaaaaaagctctgaacaaagccattgcctcttcaaacaagctcgtaaagctttggaccagttggcgaagaaccttgacttagacgtgcagttttgaccatgtaagttctggaaaatcaaaagatcaacaa

SEQ ID NO: 862 - DNA, 549 bp, Ctenocephalides felis
  misc_feature (494)..(494): n = unknown
  misc_feature (544)..(544): n = unknown
atactatttatcattagatcatatggttataatagaaaatttaattttttatactaattcttgtttttcacaataatttgaagaattctcttcctttaagtatgtatttaactttatatacaactttgatgatataagaaaatcatgctctttttatttaaatcttgtagtataacgcgttttttttattaccttaattatatttaagagttttacatttattagatgttttttggaactaggacttgccaaaataaaaatcttattctgcattttccaagatttcagaataaatttttctgaaagctgataaatgttcaataatcaatataccaagcagtccttttcccaaataatttagtaaatatatatttgttgtaaataataattgtgttaaactataatctttttttctattgaggttgtgcaatgtcaaggacatccaattccagcaaattcgtaaagattctggcgcatttgatttgtattttatntattgtattatattctattgaattaataataaatgtttatggtatcgatngggcg

SEQ ID NO: 863 - DNA, 87 bp, Ctenocephalides felis
cacctcggtggtgaaagggcagagcaccacgctgaccgtggccttccagccggagggcgtaaccgacaagagagagagagaactagt

SEQ ID NO: 864 - DNA, 549 bp, Ctenocephalides felis
cattactccagtgccaattttaaaacaaataaatagacacaacgaagatggaagttattcatacggatacgaagccgccgatggttccttcaaaatagaatccaaatatcccacaggagaagtatatggaaaatacggttatattgatgaccaaggacaactgcgagaggtggagtatggagcgaccagtggacgaggtttcgaaccggcaggaaccggtataaaagtcccaccaccaactgtcaacactaaaaacgaatactacccacccttgaaaccaggcgaagaagatgacggccaatacagagaagaccccagcatttattacaaagattctcgttacaacagcgatgtgagcaacagtttgcaacaacaacaaccccaacctcaatacattcaacctcaacctaaaccaagtgctgcaccatcgtacgctgtcctcaaagaaagaacttctactttatcaacaatgcctccctgctccagtttcggaagaccaaaagaagattctaccagctaagtctcagctaacagcaatattaccacctc

SEQ ID NO: 865 - DNA, 549 bp, Ctenocephalides felis
  misc_feature (483)..(483): n = unknown
  misc_feature (531)..(531): n = unknown
agtgtacgatgtggtgctcaacatgatttgaatacggataactgatcatcttatggatcttatggatatctcatacatgaacatatatcaatgataatggcaactaattcatcggaacctacggttcgacggaatcgttattcacggtcgtctacgaccagtgtgacgcaactgttatctgaaagttgttcgagccttcttcatcggttgacacggcgtggaccatcggaaaagcccacctaccgcgtgcggccaagcaacaggcccgaagaaaaaccgatagatactgtgaaagtttctagtaaaatatcaaccgccgttcctgtgacaattacctctgccttgggaagtaccagaagccggcttgaaagcaaatattcagcagtgttagaccgtgtaaaacgtcgggaagttatagatcatgataagacattagaacccagtccattcgtacccacggcgcaaaaaaagtgcatcgagtgnattttaggtgaaaaggcttatcctatggagtgcattagaaccaaagtnttattggatcgcgatgat

SEQ ID NO: 866 - DNA, 549 bp, Ctenocephalides felis
  misc_feature (548)..(548): n = unknown
agttgctatcagttaatagctgtaactcaaacatcacacaacgtaaataaaacaaatccttatcttgtcgtgatatcacaattcatttttcatttttcacatatcttaacagaatataatagtacgttcggatgttccagtttatttgcacgtggaccggtgaccgttatagataagagagataattgacagtgaacagtttttatgaagtgtttaggatattgagtgcacttttcgttttgttttggattttgatggacgttggattatctgtgatttagtcagagaatgatatatgtgcttgaagtcacagaagattattagcacacatgtatttggatactctgcagatagaatagtcttcagtattttgataactaaagagccatatatttcaaatgtaaaatattatctatacattcttttcaagttgtgtcttagttttcttgcagtagtgctctttttatgaagatcttttaatttagccctgtcgtctatcagtttgtggatttgatgccgaacaagggttgctgaagagagtgcagacnt

SEQ ID NO: 867 - DNA, 549 bp, Ctenocephalides felis
  misc_feature (503)..(503): n = unknown
gaggagtcggtcctttagcctggggtacagaaacacatcgaaaaccgcagacgcttccaccaaatctgagtccaaaattcttccatagatcgccaagagaagcattgagaagagtcactagtctattgatcaggaaaggggcagctggtggaggcacgccccgtgactcgcgtaaagaacgcgagggcagcgtgttcccgatgccgcttggacaaacggtgcatagggaagctttagaggaagtggtgcctaaacaaagaagaggatttttgaaaaacttttttaagaaatctaaacattactcactggaccagtaaataatcgaaaagttgacaatttaccgagttctatgttttttaggcataagaaaatatgtacactgccctcaactttagtcctaaccataatattagcattgaatactactgtagttacccgtttagttgtaggattatttattattctaataatgaattacaattaaccgtctgatatggacgaangggaagtaagacagttgcaataaatagtgcctgagaaatacatttt

SEQ ID NO: 868 - DNA, 549 bp, Ctenocephalides felis
gtacgaaaggaccacgccctttgttataacatgacattaagactcaggtagcttaaataataattttttaattctataagtatcatattataggccagaaacagcatgttatatatttatatccgaaataataagtagatttatatacgaacagacaagtgtatccaaggaaataaatttaatttatttatattattaatggtaatttatcaaaattcagatatatatatatatatatatatatatatatatatattttaaattaaaacagcatatgtaagtatatatatatgccatatgcccattaaattcagagctatttaattgattgatgagtacttaatcatttttttgtcgaaattgttttagattttttatatttattagtataattggtatattatcaaaatattatacttataccaatctgttttatatttttttcatgaaatattatattttattatgaaattattttaagcgttaaaattatttaaatatttcatacagaggcagcgttattgaaaactgcttttttgtatcttgtac

SEQ ID NO: 869 - DNA, 549 bp, Ctenocephalides felis
cgcggtggcggccgctctagaactagtggatcccccgggctgcagggtgagattaaatcgtggacatcagatcaaccaccggacacttttacagaactagccgtaattgattcaacgaccaataaaggagcaagaaggcaaataaaccaaaaagatggcaacctatccaaagcttgtcaataagcaattcaattcaccaattaaactgtattctccgcagaacgttcaggaaacgctcaacaagcaaactcagttgttagccaatggagcagttggaatcgacttcatgcacaacaagaacgtggataagccaggcaacttagcaaattcagctgtcttgagaatgcttgaagaagaagaagaaagacaacgaaaaggacaaccaccaagtttgaaaagagttgcctggccaccaccagctgaacctgaccatcaatcaggaactccaattttggaacaagagcctgtcttcgctcagacgcaacctccgaattattcgacttcaccgcacagcaacagtatcagccgaacccacgcaagccttccgcc

SEQ ID NO: 870 - DNA, 549 bp, Ctenocephalides felis
gctcggttaacttatatctgaaggctccttgacagttgttagtaattaaatctaatatattatagaataaggtgggttgtgcggttcagcaatggtatcacgctttaccgacatccttatacaataaaaaggggccatctcacaattgcaattatataactagttactaagaatttgaatattatatatcatagttttattatgaaattggataactttatacaaagattataagattactttataaatatacatatatttaggataaagttttttatgaaatgaagggctagttgatttctttggtttgagatatgagccatttgtgatttctggtagtaggctaggccagtttgtctgtatgccaggcagataattataatgaaatgtaacttcaaaggacttccatactctgaagaatcacgagtttaattttttaatattttttgtacgtgtttgcaataacttctttaaaattgacattcaatgtaaaaacagagaatagtcttatataagtatgatttgagtggctccttatttatatgaatt

SEQ ID NO: 871 - DNA, 549 bp, Ctenocephalides felis
gctcatttgactgaacgagaaaagctatatatttataccatccattatacggtggatgcgtagtggagctttacaaagacttaaacaattattagtgaacaaacaatgtgaaattaaagactttgcgatatacgaatatttaatgccttttcttacagaacattttaaacaattgaattttattgaatgaatcactctgattatttgatattgtgagatttggaaaacataaattcactaaatgtatatatgaatgggaccgtcactttgatagattaacgagaagttattaattataccgaaaagaaataattgtgtgttttcttagtaacatttgtttttcgttctcgtgcttcactcgaaataaatcatctagaaattttcatgaagcgaactgtggtgaattgttttcgtgatatttgtgatgaacttctcgtaaggacatatcacgttgtattttctagtgcattttgaatctatttaaagttattatatttatagcaagtaggcacatgacgatagcaatgtttattattatactcttagaaa

SEQ ID NO: 872 - DNA, 549 bp, Ctenocephalides felis
  misc_feature (460)..(461): n = unknown
  misc_feature (544)..(544): n = unknown
gtgttcgatagatcacataggcaattttgttattagtggaatagtttgatagttttccatatggtttagtgtgtgataaatcaatatttaaatttcaagtgtttgtgtgatatatgtgattagaatacatcgatttgataaagtgatttgggatcgtttgggtgcatctcatatgcattaattaaatataaggattgaaagattttgtatagctttagtagtaaaacagcttagtttggaggcagattatgaattctcatgagaagttttaatgaggtgacgagtaatcatatagcaagtattgacattattacatatctctcaaaaggactaataaggtaatcatctaattgatacctaagtgtgaaataaatttagtatgttgtggtttagaattttaaaggatcctacttgaaaattatgatacaaaggtgaatgttgccagtttgttatatgccgnnttaaatcacgtaatcccactccccactctttaagaacaatacctcaatattcattgttaccgacgataaatagcagcagctantcacc

SEQ ID NO: 873 - DNA, 549 bp, Ctenocephalides felis
  misc_feature (472)..(472): n = unknown
  misc_feature (518)..(518): n = unknown
  misc_feature (542)..(542): n = unknown
  misc_feature (549)..(549): n = unknown
gagaaatgtcaaagtggttaatggaattattaaagttaagttcgaagataaatttagtaaaaaggtcagtgttagcattatatcctatcaaacaataaacgaattagtaaatatcgaagcatacttattattatacacttagacttctcaatttttaaagaactcatcatctgtttgtttattataacctacaaacctcaaacatgtctgaagaaacagattttaacaaaacaattaaaacggaaccgatcgatgattatcctcaagtgaaacaggaattcgatgattgtgaaaatacatcagatttgtatatggatgatgatatatgtctgcagcaatttgaaaaatctgaggttacaattgacgaggaaataaaacaagagacgattgatgaccaagatcatgtgactagtacaaacaaactgttcagatgaaaattcttatattgtgatgaagaggcagtaattcaagnaattagtggtagtacgaacaaattattggaaaagttcaggcaaaanggaaccactaataattggaaccgnttctgtn

SEQ ID NO: 874 - DNA, 549 bp, Ctenocephalides felis
  misc_feature (468)..(468): n = unknown
  misc_feature (476)..(476): n = unknown
  misc_feature (520)..(520): n = unknown
  misc_feature (531)..(531): n = unknown
  misc_feature (534)..(534): n = unknown
agtacgggatgtttcaataatttgtcttaaggcacaatgccatgagtcactagtttaaaattttttcgacgctataagcacaaatattgtgcacttccacacaaattcgtcattttaagagggctcgagaactgaagtaaatatttttcttaaactttcagcttgtttacggaaatttatattagccaaattgccaaatttaataacttagtaaccaatttgataatttacgttcggagagggaggcaaggcaaaataataaattttaataatcggttatttcaacccaaattttgccttgcaatcgtattatgttttgttaattatatttcttgaaatataaaaatgttggtaaaaaaatttgattacattgtatagaatttttttctcactatccaaattttgccgccccaaaaatttgccgcctggcagtagccccgattgccctctgaaatccagcctggatgnggatatgnatatatatatatatatatatatatatatatatatgaaatgcggngcccatatatnatngggttcattacaaaa

SEQ ID NO: 875 - DNA, 549 bp, Ctenocephalides felis
  misc_feature (493)..(493): n = unknown
  misc_feature (501)..(501): n = unknown
  misc_feature (504)..(504): n = unknown
  misc_feature (514)..(514): n = unknown
gcgttgcgtcatacgttagaaatgacaaagttttacaaattcataagatttaaatgaaaccgtttctcatttctgtttcttttacaaaccgtgtgctcgatttatgtagtttttgcccaagtactactgtctaagacgcacgccggatatatttcatctcataattttaatttgcatcatttggtgcccactgttatataaaactaaataatattatttctttgactaagcaagagttcacaattgaatggctggccgtcgctgtgttattttatttcgagacttattgtgcaggaaatcaagatgaaatcacatggaggccacaatatatcatatcaagttgttgagtatcgaatggccaaatatcgagtgaaaattgcacaccgctccttcaccgggaattgctctgaaaataatttatgaagtctttcactactgctgtctgacactgctcttcaccaggaatctttccagaacattttaccagcttttnactactgnttnttttcactgncccttcccagaatcgtctgaaatatttaaaaaagt

SEQ ID NO: 876 - DNA, 549 bp, Ctenocephalides felis
  misc_feature (446)..(446): n = unknown
  misc_feature (469)..(469): n = unknown
  misc_feature (471)..(471): n = unknown
  misc_feature (483)..(483): n = unknown
  misc_feature (493)..(493): n = unknown
  misc_feature (518)..(518): n = unknown
  misc_feature (531)..(531): n = unknown
  misc_feature (547)..(547): n = unknown
  misc_feature (549)..(549): n = unknown
gatgaagtgaatacacaacttgataatagcaagaagttatggggtatagagatattgccaaaaacaaaaaataatgtcagaaagaattttgaaaatgccttaggaattgtaacactgacatttttatcttgtatagtattaagaaaggtgtttaagattttgtaagctaatatagccatatatttccataccttgaagggtatttattataatataatttatatcgttagtcaaacttatgtatacagataaatttcacattatctattacattttgttttgttttgtattatagtcacatgtgaaaaatatataatattaaatttgatttcattttgcctgtttattggttttgcaaaaaaatcctgtacctaaaatcataataggtttcgaaatcacatacttagcttagagtaatgaacttattaaagaaagaaaaaagctgngttacttatgggctaatatacgngngcaaatgtaaanccccaaaagntttgctggaacaattggggtgatgnatcatgtataaanatatagttttgaaaancn

SEQ ID NO: 877 - DNA, 549 bp, Ctenocephalides felis
  misc_feature (510)..(510): n = unknown
  misc_feature (536)..(536): n = unknown
gtccgtctgtcaaagtacatcagttaacctcaaagatatacttcaaaaagacattaaattgttatgaacaattatatgtttaagttaaacatctgatatgtataagcaattttttgaactcgattaaatacaataagctggtacacaattcagtacttcaaaaataagatgaataaatgaactggttaaaaatgagaagtaaattgtgactctttgaatatgtttacgaccgagtgctcaccccgttcagtcgatgtgctcatcttaaaatctgctaattgctataaattaagttaactatagtatgaaagatctaaagagttacaaataagagataatgtctgtcgtgggagaaagaccatcatcaatgatggtgtcatgacatcatctggtattggaaatccaagtgtttaccatgccctatagtgatatttttagaattttttgcttgggggctcctacgatgccaataatatctgtctaaatgaaacattcccagtcatcattttnatgaatggttaattaatggtataaangatttatcttcta

SEQ ID NO: 878 - DNA, 549 bp, Ctenocephalides felis
  misc_feature (505)..(505): n = unknown
  misc_feature (541)..(541): n = unknown
  misc_feature (544)..(544): n = unknown
aaaaaatagagatatttataataatagtaacaatataataaattctaaaaatgttcagtgtaatgttatcagtatgtacaagcatagctcgagcaaatgcaatatcaacgaatttaaataaattaagtaataagagatctttccatgaatcatgtgttacttttgctgctagaaaaaggtaccagagaaaaggcacgaaagaagaaaggagttaaagtcgaagaaaaaaaagttggtttcatcccacataatattcgtgccaaaaataagttagccgtgagcacaatagacaagcatttcaatgatagctacaaacatgtttcaagcgacaatgttttcatctctaagttttacaaaatgaaagtttacgattttgcagaagcaatagctgctcataggcaaacacatcatcctacgtgtacaatgttccagatgcaaatctaaatgttaaaattgactaaacatggctggtggaaaagtacccgattatggataatttcacgantgcatgtacccctgcttcgtccaatgtgaaagactntcntgatc

SEQ ID NO: 879 - DNA, 549 bp, Ctenocephalides felis
  misc_feature (423)..(423): n = unknown
atctttaagtcatatttgttgccagtttaactatagttatatataaatatataaccaaaataattgtgatacttcatgcctttcattacaactgatataaaaattaatttgcgtctaatttgaagtcaacattaagttaaatagttattagtctaaaactcatgaaaaagtatagggttcccattatctgcatcaattctataaatggtatggaaaatgaagctttaaaatgattgagtcaaatttgcattgtaaaaaagaaatgtcgtcttacatccatatcttcatatttgacaaaacgatattttttaaagtaaactttaagcttataaaaatcttaaatacatgcatatttatatatatatatgcacaggcaaatcctattttgctatgtcttctctttggtgcttttgggaaatctgntgaaattttatttaataacaatgagagtatgcaattaatttccttgccatttatgttttacatggatgagtttgagactaattaacttcattttttaatagtgatatagtcgcaatatatttggat

SEQ ID NO: 880 - DNA, 549 bp, Ctenocephalides felis
  misc_feature (420)..(420): n = unknown
  misc_feature (450)..(450): n = unknown
  misc_feature (480)..(480): n = unknown
  misc_feature (499)..(499): n = unknown
  misc_feature (504)..(504): n = unknown
  misc_feature (507)..(507): n = unknown
  misc_feature (541)..(541): n = unknown
  misc_feature (546)..(546): n = unknown
acattatcaatcataatagatagtagtaatgagtatagtaatatgatgttttctcagcattgaatgagttttgtcacaatccaaaatacgcaatatttctaaatcgattaaaaacacgtcacactgttgagaaaataatatattgacttactcatcttttggaacaagttttaactctaattctgtgcagttttctacctcagaactgaactaattttcgagtattaatagatatacgttaaattatcacaatataaacgtattagaaatatgttcatgtttttaattttctttaagaattagttcacaattaattaggaagatcgcctgccataacctaatttatttagctgacaaatttaaagtttcttgcactcccttgaaatttgtatatgtttacaattttgcaaaacggagatntcgtacacaatttgtttagaaataagattntagtatggcgcgtcctaccgagaattcctngggcagtgagggaaaaagngtttnaanggtaaactattttagggtaaaagacgaggtctcnttaancca

SEQ ID NO: 881 - DNA, 549 bp, Ctenocephalides felis
  misc_feature (472)..(472): n = unknown
  misc_feature (506)..(506): n = unknown
aatcggcacgaggacgatttaaaaagagagcaatttctgacaaagaacgggcagagtctaatcgaaaacgatcaaaaataatagatcctatccctacactgtctactaattctcaatgcgaggaaaatgctgatatatttccagatacttcatataaggtaatttcaatgcctatgctatcccaattgacgcctattgaggctgcagaaatggacgtggacgatccactcccattgttgccattagattccctgttagcctgcacttctgatacacatcctggtccggccgtagaagtgcaagatgctcatcagggtatgcagggattaggaatggcagaagatgaattagctggattattactatcaagtggatgggatgaatcacaactagaattactagattcattactggattcactttaaagaagaattagaaattactcatacttaaaggtaagcaatagtcttgntggtaagcctacaagaaaaagactttatttggtnaattttatctaagatgacgagcccaaaaatttggcattttttg

SEQ ID NO: 882 - DNA, 549 bp, Ctenocephalides felis
  misc_feature (4)..(4): n = unknown
gttnaaatggcgcctattctaaaagaagtaaagtctcgtaaaccttacatactcttgtcagctcgtaggaagcgtgaaatagcacatgaagctaaaaaggaatttttacaataccttaatgccaagcatccactgtttactgagaaggatttggatgttaccatttgtggctccagtacaagtgttgaagacgtcgagaagaatttatatcacacaacacgtgtaaacgtcaaacatcaaagaccttttaatagcattaatgaagaacaaagctttgtgctttgtgataatgaagaaaatgtagaagaaccttcttacacacgtgtaaacgttaaacgtcaaagaccttttaatagcattaatgaagaacaaagctttgtgctttgtgataatgaagaaaatgtgggagaaccttcttccctctcacctttgcaatgcgaactacagaatctgttaatacccaaactatgacgccagagtgtcaactaaattgtggaaattctgaggcgcatggcataagaatgaactccagtagatctacacatatgc

SEQ ID NO: 883 - DNA, 549 bp, Ctenocephalides felis
gttggccgttgtgaggttatcgtgtgccttgaatcgctcgaatctaagctccatcgtgctaattatttcgataactcccaccccgactgggacatctcgagagtcgggaagcccctggcaaaggctacggcgattttgtttaaatcagtgtctacagttgaacgggtccacttggacgggaaacagtgttcatacgagattattatatatttaaaattgattgaaacagtgacaaagtgatatagtaaaatattttactaactgttcttaaggattcgaatcataagatttctttacatgatggctgaaatgaccgccagcacgcgcttcaaacaataacaccaatcattctccaccacaagtgcaacaattgtgaaataaaacttgattttattccaatcatataaactttaaatacagtgcaactaatcaaaataatttgtcggcaattgtaaaatacctaagtgtcgataagtctatatgtgatcaggctaaagccttgaaaaagaatcttagtaggaatattagtattcgtattaattaattaat

SEQ ID NO: 884 - DNA, 549 bp, Ctenocephalides felis
  misc_feature (543)..(543): n = unknown
  misc_feature (549)..(549): n = unknown
gctactcctaaccaaaaaacacatttttgataagttcgttagtggcttctgtcggattttaatttttaattcaatcttacatttgcagggtcaaataatttaactatttttatttaatacagattctaacgataatcttttattttgtaatatgtctgaagaaggaacaacgagaagaactacgaggtcgcttgccaggcggctgagtactgattcaatatcgcctccagctgcagggactcctggcaaaaaagcgagggcttcaagagttacggggttgccgtctattgcagaaactaaaccgaaagcagttagcactcgtaaatcccgaagattaagtactgacttaaatttagaagaacctggaagcagaccatcaacacctatatcaactgaaaggcgtcgttctcgccgactaagtattgcttagatgaacaacgcccacaatctgtatcaactctcccattggtggagttatacaagaagaggaagacatcaatattttagcaatgaaagatgatataaataataaatccggtatgngtgtgn

SEQ ID NO: 885 - DNA, 496 bp, Ctenocephalides felis
agttacagctcctgttaatgctttagctgaaacaagtcaaacttcatcaatatttggtggtgctaaaccacgggaagaacccactgagaaataagttatcaagttttaacattaattattaaccaccatatagaataccatcttgaatcatgtaataatttttcgattaaaaattctgcaaaactcataacaggcgtcgataatcttactcttgcaataaattctttaactgatatataaaatgtatcaagttttgtaaaagaaaaatcaataattattgatttacagaataaaatatttattttgtttaaaaattgactaatactttgtaataatatgtaattcttatatatatagattaaagagttgttgttagtgtcttttgttttcaaatagttttacactaatatatttaatacaaaacgctttacaaattttacaataattgatgaaaactatttgagattttattctcgaagtacaacttatgtattaa

SEQ ID NO: 886 - DNA, 549 bp, Ctenocephalides felis
  misc_feature (4)..(4): n = unknown
  misc_feature (518)..(518): n = unknown
agcntaaataacaagactgacagtttagttttaacaattcatcatgggcgatggaagagatattgaacgacagccattgattcaaaatgatggaactggaagccttaggaatcaaggatcctatacggaaggttctcaaaccacgacggtttcccctataggtcctgatgagttgccaccgtcttaccagggaagttcggccagtggcgtgcccatggtcacttgcagggtgtgtcaggccatggtcgatatttcaggcaaacgcgaacagcatgtcgtcaaatgcaatcagtgcaatgaagccacacctatccgcaatgcaccaccaggcaagaagtacgttcgatgtccatgcaactgtttattgatttgcaaaagttcatctcaaaggatagcttgtccgagaccaaattgcaaacgcataataaatttagcacctagtcctgtgacaccacctgtcctcacggtggaaattttcgtgccaggaatgtgcagggtttgtgtgctattgtggggancgtttttttcaacaccctaacaatgcctcgc

SEQ ID NO: 887 - DNA, 549 bp, Ctenocephalides felis
  misc_feature (546)..(546): n = unknown
gctaataatgtgacagccataaatattgtagattaatgtagaataatttgtattgagatttagattttgtagcatactagaatgttatgtgtgcttgaataatgcaagtgagggaaccaataatttggtctgtttttataatacattttagataataattattggtgaactcaatcttgcatatacgccgctaatgaattaaaccagcaggcatataatttttgtacttaaatatttatataactaaaactgatacgggttacgaaaaacacataactatattatttatgtttctagacccgcatgaattaaaacgaaaacggcaaaaaattgacggggatccaaaacatcttttatggcaactgcagggtcaaaatccttctacgagtaagtcattttcaacttttattttttttatcagcaaatcaaacagggttcaatgtcaggtgacggtgaatcacggggtggatgaatataaaaactcatatcatacgcttattacatataacactaccattttcatattatcagtaattttctaggagnata

SEQ ID NO: 888 - DNA, 549 bp, Ctenocephalides felis
  misc_feature (492)..(492): n = unknown
  misc_feature (511)..(511): n = unknown
  misc_feature (521)..(521): n = unknown
atggcatcctaaacaatataataatataataataatgaatggcatttctcgctaacagatattttaatatagcgatttgaatagttttaatttatttgaatattgttcagagtgatactttttatatttgctgtaataaaaatgattattatgataacttatattatgaaagggaaaatatatttaaacttttaattgattacccaagaggatattgatttgtatatatctacttgaatatgaatttgaacagttaacattatcttcaaatttttaatataatttaaaattattggttactagcaaaaacgtcaagatgtctaattacgtgttgaaagtcaaatcaaaagaaggacagcatattttaagagatctcaaatcttccatgactctgggcgatcttttactgaaactttcatgttgacatcgatatctaaaccaatttgcaaattttatcgggttttccgcctaaagcattagatttatctgatnagagtaagactttaaaggngagtgatttnattcaggagatctgtattgtgaaaaaat

SEQ ID NO: 889 - DNA, 549 bp, Ctenocephalides felis
gagaagggaaactgatcaccatgaaattcgcagtagcaattttgggcctggccctgtgtggtttggcatcagctcagttccagaatggacgcatcttagaaccaccagtacctgcactctgcgcccaaaggacgatacacgaacgtagcccagacggcaaaggatacttcttctcgtggcgtgacccacaattggctggtgttgaggaagattggttgggcgtccgcaacttctgtcgccaacgttgcatggacagtgtcagtttagaaaccagtgccgaaaatgaatggatcaagcaaagaattgtcaatggaaatgtcaaatacatctggaccagcggtcgtctatgtgacttcaagggttgtgaccgaccagatttacaacctgtttccgtaaatggtggttctggaccgctgaattgcaaaaacttgcccaaccacagacagacaacaaaacgactggtctgaaggagtggtattgtcttcctcaccagatacaagaattgaacaaggtggacaaccgaaactgtttgcagtttgacactttaca

SEQ ID NO: 890 - DNA, 549 bp, Ctenocephalides felis
  misc_feature (544)..(544): n = unknown
cgtgggataaaaaatgaaattatcaattattttactttttgtggcttgtatagccttggcttcggctgcaaatttaaaacaaggaaggaaagctaaaagatcgggtaatttggtgatgaaaaaatcaccaagaggttctgaaaataatatttttaacactggttttgtgaaggattccatcgatttcggagcaaagactttaattcgtgccataaatttagcagaacccttagttcgtgatagttttgacctaggaaaagatgtaaccctacgtctgatccgaggagcaccaattgaccaacatggaagagcttctgattctgaactttttgaaagattggatgaacttgtccagaatataggaaaagcttttgaagccctatttgataattctgaaacaaatgcgaggaaaggacctccaacggaggctagggttccatactaataataatagtaaaggactaagggtgagaaaaaattttttgagggcaaaatggaggagaaggatgtgtgaatttgatgtctcaatataaaaaaatgcatnaatag

SEQ ID NO: 891 - DNA, 548 bp, Ctenocephalides felis
  misc_feature (515)..(515): n = unknown
  misc_feature (544)..(544): n = unknown
cccttccccccttccccacaaacatcacgtgtatttttagttatgaaaaaaaattgtaattattttgatttttggatttttttaaaaaaaaattctctctccctaaaaacatcacctgattaatggacgcatcctatttgtattccttatataaaaataaaaaatgtgaaatttagatatactgaatgattactcgtaccaagagtcgaaacatataaataaataatataaaaatcaatttaccattttcaaatttgatgaattggttgcaaactataccaaattcctcaattccaatcatattcatatacaaaaatacctatcaaattttccgattcatttaaaaccgattacaatcaattccattaggcaccagtatttataaataaaattttgcgcatatgtgtgaacatatattcattattttattagtctgagaaatagatgttgactattcgagagagcagcgaaatgtcgatatttgccacctcatcagatgttggataaccaaccgntaataaccgatttttagggggatgttaangcct

SEQ ID NO: 892 - DNA, 549 bp, Ctenocephalides felis
  misc_feature (479)..(479): n = unknown
  misc_feature (528)..(528): n = unknown
tatttttgggtcttttatgttttacaaaaaggatttatcgttttaagtttaaataatgacaatcttacaaattaatctaaacaaaaatgtaacaatattgctttaattaaataattcgtttattgttatattgaatccacaaatatgaattgttgattattagcatcgtttatttttgttgtaaataacttatgcaaagcagagttgatcttataaaacatctaatacttattttattatacatagtgtgatacttgtttttattttaaatacattacaaactaaatgtagttcatctatgatttacatgaaaaaaaattagttattatttgttagtgtttaagacattttacgcaatatggcagtaaataaatgcgcacactaaaaattattattaatatttttataggaacgaaagtctataattctatacactacatcgctttgtgcaattgaaataatatttttcattatattgnatgaatttagtatatcaaaacatttaaaatggttatatgtatacaggtncattattgtaataatgagaag

SEQ ID NO: 893 - DNA, 549 bp, Ctenocephalides felis
  misc_feature (455)..(455): n = unknown
  misc_feature (522)..(522): n = unknown
gaacagttggataaaataaaaaattgtgaactaaaatttattttcaaatttcattaatttttaacaaacccttttccgtaatattgacggaacctgcctaagtgaagcaaaggacgatatcggttgtcgttggtagtgtagtgaaactataaaattgtgaataaaacttaaaacatcaccaaaaataatccacacacttgcagtaaacaaattattatttgtctctatagacagaaccaaatagaagaaaaactcagctgccaaatcaagattgacataactgtcaattatttttatgttgatcatttattaatatatcaattttgactttcatcgattctatctcggccccccttcccaccatgacgctttcggccaacagcaatgctaccaatcgcctcgggtcgcagcagggacgtagcctcaattagccgccgtgcgaatacaggccggcncagaggatatgcgtgcgcaagcagtcaaacgttgcaaaatcaaagtgacggtgcaagagacagctgnagaatctattgacagagatacgcgcat

SEQ ID NO: 894 - DNA, 549 bp, Ctenocephalides felis
  misc_feature (401)..(401): n = unknown
  misc_feature (530)..(530): n = unknown
  misc_feature (548)..(548): n = unknown
attagacttgccacatctaaataatataaaaattagtaaaataatttgtaaatatttatttaaaaaataaaattaggattttttattaatatgaaataataaataatcaaataaatttagtgtaaataataaaagtgtgcatgtgtcattcttgattaatattcaacgcaattaaagatcaattttgaatgtatcctctcaaaaattgttgtatgaggagatgactagcaaattttttataaatgtcgtggataaatgagtttcgaaaatttattttggattttataagaactgttttcgaattataatagagggaagagctagaaatccacatatcaaaattttaaatggacctgttatagaagaaaatgaaactcaacaaaggaaccatgaaaaaaccngagttctctacaattgcccctgtgtcgaagaagacgatgatcgagtatatctaatttgaatcagatctacacaaatgagtggccatcctgcccattttatagactcagacaagcggagggcccttgganggcagatgaaattcccant

SEQ ID NO: 895 - DNA, 92 bp, Ctenocephalides felis
taaaatcatctccttttgataaatcaaagctcttgattaacatttcttgtattaattttcgcttcttgtattcagctttcatatttgccggt

SEQ ID NO: 896 - DNA, 386 bp, Ctenocephalides felis
atatatcttacatcgaatctaataacaataaagagttattaattttcatgtcgatgttttagaaaatgattcagtagcaacttctgaattttctttgtaattgataatactttctcaaagtataattgcatttcacaacacacgacggaaatatggttatggtccatatgaagcaatgctcgttcttctatccacttgcttctgataaatgttcggtataaagaatgcaatcactccacatgctatcagagatgttcctgatattaaaaatgttaaatcgcaattataatctagaattattcctacaacattgcttccaacaacacttcctaatcgacccatcattaaagatatacatactgccattgccctgagttgtgtaaggt

SEQ ID NO: 897 - DNA, 105 bp, Ctenocephalides felis
caggcagaaacgagaccaattactcactcgaagagtggaaggcattgacattgccaagagaatataattccaaaggacaaatcgactacagctcttgcaatatgt

SEQ ID NO: 898 - DNA, 498 bp, Ctenocephalides felis
  misc_feature (37)..(39): n = unknown
  misc_feature (50)..(50): n = unknown
  misc_feature (74)..(74): n = unknown
  misc_feature (113)..(113): n = unknown
  misc_feature (158)..(158): n = unknown
  misc_feature (162)..(162): n = unknown
  misc_feature (228)..(228): n = unknown
  misc_feature (237)..(237): n = unknown
  misc_feature (251)..(251): n = unknown
  misc_feature (258)..(258): n = unknown
  misc_feature (260)..(260): n = unknown
  misc_feature (291)..(291): n = unknown
  misc_feature (300)..(300): n = unknown
  misc_feature (321)..(321): n = unknown
  misc_feature (347)..(347): n = unknown
  misc_feature (363)..(363): n = unknown
  misc_feature (377)..(377): n = unknown
  misc_feature (383)..(383): n = unknown
  misc_feature (391)..(392): n = unknown
  misc_feature (417)..(417): n = unknown
  misc_feature (419)..(419): n = unknown
  misc_feature (434)..(435): n = unknown
  misc_feature (444)..(445): n = unknown
  misc_feature (453)..(454): n = unknown
  misc_feature (466)..(466): n = unknown
  misc_feature (474)..(474): n = unknown
  misc_feature (477)..(478): n = unknown
  misc_feature (482)..(483): n = unknown
  misc_feature (490)..(490): n = unknown
  misc_feature (495)..(495): n = unknown
aagttttcgcagtttacaaatccagaagagataccannngcaacttcaanatcagatcaatgagtgcagttcanaattaagaatgtctagttcagagctaacaaagctgctancgtcattatcaagcatattgagcgatcaatcatatatccaacagnttcncgatatcaacgataccatcactgagatgtcagaagttgaaaattggaagtcatcaacaaatgccangtcatcaangaatggcacgtcanaaataantntattaaattctttttaaaatttatgtattantaaattgtnatgtctaatgcttcatattantattaagttttcaaatttttatgttnttttttgtactgtatnaagagtttacttanttttcntagtttgnnatacctgggtaatttgtacctattnangaagcttaagctcgnngaaaactannccttaccnntatcagtgctangtattttnacnncaannataacangcttngag

SEQ ID NO: 899 - DNA, 359 bp, Ctenocephalides felis
cgtcaagtccaatccaagagtggaaactttttcaggaaagctactagagaggtgtcatttccaccagtgggatcgagaaataatcgcacaattagctgtgttcgtgccctggaccaatatgtaaatggccaaggaggctatgccactcttgtcaatggtggagttggctggaaaaatgtaactttactcctatcttctcagactggcaaaggatttaacttcttagttgaaatttggggatattagattagaaatataatgaaaatgtgaatatagaaaaaaaattaaatatacaatagtattttaaatttggcacacatctatctatgcatccataaataaaggttatatacagcatt

SEQ ID NO: 900 - DNA, 353 bp, Ctenocephalides felis; identical to SEQ ID NO: 490

SEQ ID NO: 901 - DNA, 498 bp, Ctenocephalides felis
  misc_feature (221)..(221): n = unknown
  misc_feature (410)..(410): n = unknown
  misc_feature (415)..(415): n = unknown
  misc_feature (434)..(434): n = unknown
  misc_feature (436)..(436): n = unknown
  misc_feature (465)..(465): n = unknown
  misc_feature (476)..(477): n = unknown
  misc_feature (480)..(481): n = unknown
  misc_feature (483)..(483): n = unknown
  misc_feature (486)..(486): n = unknown
  misc_feature (497)..(498): n = unknown
aagttttcgcagtttacaaatccagaagagataccagagcaacttcaacatcagatcaatgagtgcagttcacaattaagaatgtctagttcagagctaacaaagctgctatcgtcattatcaagcatattgagcgatcaatcatatatccaacagcttctcgatatcaacgataccatcactgagatgtcagaagttgaaaattgaaagtcatcaacaantgccatgtcatcaaagaatggcacgtcataaataattttattaaattctttttaaaatttatgtattattaaattgtaatgtctaatgcttcatattagtattaagttttcaaatttttatgtttttttttttgtattgtattaatagtttacttatttttcttattttgatatacctggtaatttgtncttanaaagaagcttaagctcgtncnaaactatctttatatttatcaatgcctangtattttaagnncannantanaatgctttgann

SEQ ID NO: 902 - DNA, 498 bp, Ctenocephalides felis
  misc_feature (43)..(43): n = unknown
  misc_feature (63)..(63): n = unknown
  misc_feature (66)..(66): n = unknown
  misc_feature (97)..(97): n = unknown
  misc_feature (99)..(99): n = unknown
  misc_feature (104)..(104): n = unknown
  misc_feature (134)..(134): n = unknown
  misc_feature (146)..(146): n = unknown
  misc_feature (149)..(149): n = unknown
  misc_feature (200)..(201): n = unknown
  misc_feature (205)..(205): n = unknown
  misc_feature (221)..(221): n = unknown
  misc_feature (253)..(253): n = unknown
  misc_feature (310)..(310): n = unknown
  misc_feature (350)..(350): n = unknown
  misc_feature (354)..(354): n = unknown
  misc_feature (385)..(385): n = unknown
  misc_feature (397)..(397): n = unknown
  misc_feature (401)..(401): n = unknown
  misc_feature (413)..(413): n = unknown
  misc_feature (430)..(430): n = unknown
  misc_feature (430)..(432): n = unknown
  misc_feature (439)..(439): n = unknown
  misc_feature (445)..(445): n = unknown
  misc_feature (454)..(454): n = unknown
  misc_feature (465)..(466): n = unknown
tttttttttttttttttttttttttttttggacggcccaaacnatttatttttattaaaaagntanatgtaatttcataaagcttctatatttacanantttanataatcagaaattactatagttaatgacantttgtttgtgcnccntacataaaatacaattttatacattttaatttttatacatattttttaaanntaantgcacagatcatttgngtatttattatattaattgactactttatganaatttgaatcctaattagtctattcaagattgttttcctggtttaagccttacttancaatctcacttttgcattcttcgccgggtggcgtgggtangcancgcaactccgttttatcaaagtgcaagccanttggacaatcanaagntttatttgccanttggttgttaaccaagnnnccattgntaacantttttacantctcttcgatnngaaaaaaacgttttcacctttgcatgcagttc

SEQ ID NO: 903 - DNA, 500 bp, Ctenocephalides felis
  misc_feature (416)..(416): n = unknown
  misc_feature (426)..(426): n = unknown
  misc_feature (436)..(436): n = unknown
  misc_feature (468)..(468): n = unknown
  misc_feature (474)..(474): n = unknown
  misc_feature (482)..(482): n = unknown
  misc_feature (484)..(484): n = unknown
tttttttttttgtcatttttaatttatttcatcaactacattgaaattaaacaaataaagaactattattcttaaattaaagggaaattttacatcagtacattcaacatgaatcaattctaaaattatgtgaataaccaaaattttaaaccattaacacaaatattttttattcccacttaacttattacttattaaaatattacttggcaagtatttttatatttttgtatttttttaggtatattataaagacgcctttagttgttgccttatgaataaaatacatatttataatacattcacatattacatactaaactattgagaagacttagacgatttaatggaattaatatgaaggaatttattaatttaaattttataaatataaaaaattttagtgctttttttangatatcctangttatattanaattcgttttcatttacagatgtggcatatangtatantttttgtnanttaatttttagttatt

SEQ ID NO: 904 - DNA, 440 bp, Ctenocephalides felis
  misc_feature (2)..(2): n = unknown
  misc_feature (212)..(212): n = unknown
  misc_feature (377)..(379): n = unknown
  misc_feature (407)..(407): n = unknown
  misc_feature (412)..(413): n = unknown
  misc_feature (420)..(420): n = unknown
  misc_feature (423)..(424): n = unknown
  misc_feature (426)..(426): n = unknown
  misc_feature (428)..(428): n = unknown
antaattttaaaattaatctttcaagttattctgaatcgtttgacagaaaaaaatttaaaaacatgttttcttgttttactaaaaaatgtcgttattttttcaatgaatattgaaagtgtttccaaaaatttctaagttaatttaattaattttttaattatttttattcagatgttgtcacacaaaactatttatatatcatcatatttantttgtatatattttctatgataaacctgtaaattatttataaaaagaagccaaaaaaaagaatttgtagtgaaaaaatatttcaaatttgaaacacaaactgaatgttctgaatgttaattatatgtgattaaaataataaacatttattgaaatattaaaaaannncaatacaaattatggtagatagtagaanccaanngcataanaannancncaaaaaagcttg

SEQ ID NO: 905 - DNA, 494 bp, Ctenocephalides felis
  misc_feature (15)..(16): n = unknown
  misc_feature (52)..(52): n = unknown
  misc_feature (81)..(81): n = unknown
  misc_feature (92)..(92): n = unknown
  misc_feature (94)..(94): n = unknown
  misc_feature (110)..(110): n = unknown
  misc_feature (117)..(117): n = unknown
  misc_feature (120)..(120): n = unknown
  misc_feature (124)..(124): n = unknown
  misc_feature (137)..(137): n = unknown
  misc_feature (152)..(152): n = unknown
  misc_feature (166)..(166): n = unknown
  misc_feature (183)..(183): n = unknown
  misc_feature (226)..(226): n = unknown
  misc_feature (262)..(262): n = unknown
  misc_feature (283)..(284): n = unknown
  misc_feature (292)..(292): n = unknown
  misc_feature (311)..(311): n = unknown
  misc_feature (313)..(313): n = unknown
  misc_feature (356)..(356): n = unknown
  misc_feature (358)..(358): n = unknown
  misc_feature (372)..(372): n = unknown
  misc_feature (377)..(377): n = unknown
  misc_feature (388)..(388): n = unknown
  misc_feature (401)..(401): n = unknown
  misc_feature (408)..(408): n = unknown
  misc_feature (411)..(411): n = unknown
  misc_feature (413)..(413): n = unknown
  misc_feature (417)..(417): n = unknown
  misc_feature (419)..(422): n = unknown
  misc_feature (431)..(431): n = unknown
  misc_feature (437)..(437): n = unknown
  misc_feature (441)..(441): n = unknown
  misc_feature (448)..(448): n = unknown
  misc_feature (453)..(453): n = unknown
  misc_feature (460)..(460): n = unknown
  misc_feature (463)..(463): n = unknown
  misc_feature (482)..(482): n = unknown
ttttttttttttttnnttttttttttgaacggcccaaacgatttatttttantaaaaagatacatgtaatttcataaagcntctatatttananattttaaataatcagncattacnatngttnacgacattttgtntgtgctccttacatngaatacaattttanacattttaatttttatncatattttttatatttaattgcacagatcatttgtgtatttantatattaattgactactttatgataatttgaatccnaattaatctattcaagattgnnttcctggnttaagccttacttagcaancncacttttgcattcttcgccgggtggcgtgggtatgcatcgcancnccgttttatcaaantgcancccgatttggncaatcataatgtnttatttnccncntgtngnnnnccccagaancattgntcanacttttnacaancccctcnatngggaaaaacctttcacttntgcatgcacttc

SEQ ID NO: 906 - DNA, 498 bp, Ctenocephalides felis; identical to SEQ ID NO: 182
  misc_feature (219)..(219): n = unknown
  misc_feature (403)..(403): n = unknown
  misc_feature (415)..(415): n = unknown
  misc_feature (480)..(480): n = unknown

SEQ ID NO: 907 - DNA, 215 bp, Ctenocephalides felis
agactgaccctgggcccaggcgtttgcttaacagtgacgttaaagacgaccaaccacagtcaacgaatgatgaaataagctcatccacaactgctccaagttcaaacgtgaatgaaagcaatggaaacctcaccgaatcacaacccttaagccaaaatacttcaacaaatactccattagaaacatcaaatacctcactagcagaaagcagcagt

SEQ ID NO: 908 - DNA, 498 bp, Ctenocephalides felis
taccttttgctaccgatgctcaagggcgataacggacccacagcctggcgtccaaaatgcttcctcgtccgcaacgacatagtcgttttgcaagatttatccatgtataattttcgccattcgtatccaaaattctctttggatcttgatcatgttaaagttgctttaacggcattggctcgtatgcatgcaagttgcattatctacgagaagaaaaaaaattgttgcatggggagagtttacaaagatcttatgttcgagactatggccaacaataatcaatggtggagaactggtgaggatactgctttagcaattgctgaggaatctgagaaattcggcaaatataccgaataccattccatggtccaggagaagttaattgatttcctgagattggcatggtctatggtaaaaccatcgcgcatttataagaatgtggtatgccaccgcgatacgcgcaatcacaatttgatgttcaaatataattcaactggt

SEQ ID NO: 909 - DNA, 245 bp, Ctenocephalides felis
tagacatgcaatataccaaagtttctcaggactatacttgataaatttttttgcatggcaaacataagctggtctttcaggttcctcagatttagtcggtggaaagatcgtgttattgtaagacaaaaacttttgtggaccttcagatctatctgtgcgttgcaaggaactagatgtatgaaataaacttcccctaaataatgaagttattttgctattgattagcataagttaagcactctcgt

SEQ ID NO: 910 - DNA, 386 bp, Ctenocephalides felis
  misc_feature (353)..(353): n = unknown
  misc_feature (357)..(357): n = unknown
  misc_feature (371)..(371): n = unknown
cctacacaactcagggcaatggcagtatgtatatctttaatgatgggtcgattaggaagtgttgttggaagcaatgttgtaggaataattctagattataattgcgatttaacatttttaatatcaggaacatctctgatagcatgtggagtgattgcattctttataccgaacatttatcagaagcaagtggatagaagaacgagcattgcttcatatggaccataaccatatttccgtcgtgtgttgtgaaatgcaattatactttgagaaagtattatcgattacaaagaaaattcagaagttgctactgaatcattttctaaaacatcgacatgaaaattaataactcnttantgttattagattcnatgtaagatatatgt

SEQ ID NO: 911 - DNA, 66 bp, Ctenocephalides felis
ttattgcatttggtccaaaaatctcaggcttataatattggcccacagaagaatatcctggtctgt

SEQ ID NO: 912 - DNA, 498 bp, Ctenocephalides felis
  misc_feature (489)..(491): n = unknown
  misc_feature (493)..(495): n = unknown
  misc_feature (497)..(498): n = unknown
tgaaatgtgaagacgacgtcaacgaatggtttgacccaaaatctttctcgtgcagaactgcatgcaaaagtgaaaacgttttttccgatcgaagagattgtaaaaaatattatcaatgtttcttggttaacaacaaatggcaaataaaacattatgattgtccaaatggcttgcactttgataaaacggagttgcgatgcatacccacgccacccggcgaagaatgcaaaagtgagattgctaagtaaggcttaaaccaggaaaacaatcttgaatagactaattaggattcaaattatcataaagtagtcaattaatataataaatacacaaatgatctgtgcaattaaatataaaaaatatgtataaaaattaaaatgtataaaattgtattttatgtaaggagcacaaacaaaatgtcattaactatagtaatttctgattatttaaaatatataaatatagaagctttatgaaactaaaaaaaannnannnann

SEQ ID NO: 913 - DNA, 498 bp, Ctenocephalides felis; identical to SEQ ID NO: 181
  misc_feature (443)..(443): n = unknown
  misc_feature (495)..(495): n = unknown

SEQ ID NO: 914 - DNA, 123 bp, Ctenocephalides felis
tcttatgatgtagtcttaaataaatgacattatttctatttcataaaatgttactaagattgctcatattggttagaagatttaaaaataaatcagcagcaagataaatgaattctgtaatgc

SEQ ID NO: 915 - DNA, 190 bp, Ctenocephalides felis
aatgtcatttgttttcaaatccgtagctattttagctgcttcagctgatgattttgccacaccaaatggaggtgtcggtatgccaccttcctgcaaaatgctgaaggatatatgctccaagacattgagctttcgtgtttgggtgttttgccatggtgctacggataaaatcttaattccattttttcgt

SEQ ID NO: 916 - DNA, 500 bp, Ctenocephalides felis
  misc_feature (375)..(375): n = unknown
  misc_feature (410)..(410): n = unknown
  misc_feature (413)..(413): n = unknown
  misc_feature (435)..(435): n = unknown
  misc_feature (457)..(457): n = unknown
  misc_feature (465)..(465): n = unknown
  misc_feature (482)..(482): n = unknown
tttttttttttttttttttttttgctgaactataacttgctcttttattgctcatcatataaggctcaacagaaaatcattattaatattacatatttttatagtgatttcattgatataaccttacatctattttttaattcatttaatacctagtgccaaataaaaaagttatgcatataagtgttaacaatttaaatgcttacatataggacatttacttgaggccaagttatattgacaatattcagttgatgcacgaataaaataaaatgatttaattataatcattctattcgtacaacgattttatacaatcaatctgaagctacaagctagaattatataaatacattttaatactatacaaatatncagaaatatttcatcctcatcgtcctacacaaatncancctaaaatgtcttacaaggacngtcatatatcacgaaaggaatnaaaattangaaagggattaattaanactacattaataatacat

SEQ ID NO: 917 - DNA, 95 bp, Ctenocephalides felis
tacgagtgcacattaaacgctcaaggtgtattcgacgtggcccgatatgcttgtgcagctgagttatatttcaacagcgttctgcagcagtgcgt

SEQ ID NO: 918 - DNA, 68 bp, Ctenocephalides felis
gaaaggaccattaatttataataattattttaatttgaataaaattaaaaaaaaaaaaaaaaaaaaaa

SEQ ID NO: 919 - DNA, 498 bp, Ctenocephalides felis
  misc_feature (449)..(449): n = unknown
  misc_feature (455)..(455): n = unknown
ttttctactttcgccgtcaagttttataacgactgaaaattcaataatccaagtttaattggttatatttctttttacagttatagataattctataataagtattgtttgagtgctaagtcagtttctattcttgtttttgtgtgctgtcgatgtcgatatcgatagagccgcagaccttatcaatttcacttatcgttatgtgaaactactttgattgagttagaatttgtcactgagctttatcaaggtcttgtatcatgaaaacagatcggttgcgaaataactggcatagcattctgacacaaaaatactagaatacctactcaaaacgtcttttatgaccgtgcgatgacctttgaaacgaacgttcattagtatccgtatatccgattgatttacttttaacacgtttaattactacagaagtaatatcaaacgaacggctntcgctnaagtttatatgaagtaagaattgtaacaagcaaagaagtataa

SEQ ID NO: 920 - DNA, 500 bp, Ctenocephalides felis
  misc_feature (14)..(14): n = unknown
  misc_feature (40)..(40): n = unknown
  misc_feature (42)..(42): n = unknown
  misc_feature (49)..(50): n = unknown
  misc_feature (106)..(106): n = unknown
  misc_feature (147)..(147): n = unknown
  misc_feature (158)..(158): n = unknown
  misc_feature (179)..(179): n = unknown
  misc_feature (188)..(188): n = unknown
  misc_feature (216)..(216): n = unknown
  misc_feature (227)..(227): n = unknown
  misc_feature (237)..(237): n = unknown
  misc_feature (256)..(256): n = unknown
  misc_feature (258)..(258): n = unknown
  misc_feature (271)..(271): n = unknown
  misc_feature (291)..(291): n = unknown
  misc_feature (309)..(309): n = unknown
  misc_feature (313)..(313): n = unknown
  misc_feature (348)..(348): n = unknown
  misc_feature (361)..(361): n = unknown
  misc_feature (365)..(365): n = unknown
  misc_feature (367)..(367): n = unknown
  misc_feature (369)..(369): n = unknown
  misc_feature (375)..(375): n = unknown
  misc_feature (405)..(405): n = unknown
  misc_feature (409)..(410): n = unknown
  misc_feature (426)..(426): n = unknown
  misc_feature (428)..(429): n = unknown
  misc_feature (431)..(431): n = unknown
  misc_feature (434)..(434): n = unknown
  misc_feature (438)..(438): n = unknown
  misc_feature (448)..(448): n = unknown
  misc_feature (452)..(452): n = unknown
  misc_feature (458)..(458): n = unknown
  misc_feature (465)..(465): n = unknown
  misc_feature (487)..(487): n = unknown
tttttttttaattnttttttttttttttttttactttacnanatatgtnngtattacacaacattttagttgcatatacaagcttaaaatataaatatatattatnaattttagttaaaaaatctaaatgctaggtaaagaacctantaccgaagtanttatggattcgaatataatcnaagaaatanatctaaaggcatttgtatcattcctgcnataatttgtantgaaataggnaataaatattccacaacananctaatgtattaanaaacatttacgtttggtcanccattcataacaatctanatanttcaaaataataaattttacaggaccaaatacatnaagcggtcatttntgtngnantgcacnaggaaacacacatattcaattattgcgccntgtnnctataataatttttgngnncnttntgcnacttattaancaanatttgngagatantatttttcgtttcttttttganacattttttacag

SEQ ID NO: 921 - DNA, 173 bp, Ctenocephalides felis
tttctttagtggtgcactgtagatatccactttgatcagcgcacacttgatctgggctacaggattccttaaccggatctgctcctatttccggacaatactgcatttcgggtgaactgcacgaattcacgcaactaaattttacttttttacatttttgctcgggtttcggt

SEQ ID NO: 922 - DNA, 217 bp, Ctenocephalides felis
cccttcagtatttcttttattttcaattacgaaaatcagaaaacagttattccaagatcatggttcttgttcccttctttaagtttatttcctatcctaaagtgttaactattactacctaaactgcgatgatatttgtgatgaatgatgttgacatgatgtccgaagacgttggctaagatgcggtaaaattctgttcctggtcatcatcgttccc

SEQ ID NO: 923 - DNA, 269 bp, Ctenocephalides felis; identical to SEQ ID NO: 280

SEQ ID NO: 924 - DNA, 303 bp, Ctenocephalides felis
  misc_feature (5)..(5): n = unknown
  misc_feature (7)..(7): n = unknown
  misc_feature (29)..(29): n = unknown
  misc_feature (44)..(44): n = unknown
  misc_feature (57)..(57): n = unknown
  misc_feature (72)..(72): n = unknown
  misc_feature (74)..(74): n = unknown
  misc_feature (82)..(82): n = unknown
  misc_feature (93)..(93): n = unknown
  misc_feature (147)..(147): n = unknown
  misc_feature (206)..(206): n = unknown
  misc_feature (214)..(214): n = unknown
  misc_feature (275)..(275): n = unknown
attananatacgctgagactttaacctanttatagacatagaanatataattcttanatattaaaaccttananacttactntataaattgtnatttaaaaacaggttgaatataaagtataaataattatagaagattgatttccntaacagtgagtgttatgttaaaaatatatatttaatacatgaaatggacaatgtttcanttattganacgaacttcttgactatgtctgcaatcgatgactgtgagttatatataaaagttttcttanatacttacgtgtatatatataagtatgt

SEQ ID NO: 925 - DNA, 145 bp, Ctenocephalides felis
  misc_feature (2)..(2): n = unknown
  misc_feature (32)..(32): n = unknown
  misc_feature (34)..(34): n = unknown
cnttacgccttcagtgtgccggaattcggctnancgtggtcgcggccgcggtacgaaaggaccattaatttataataattattttaatttgaataaaattaaaaaaaaaaaaaaaagaaaaaaaaaaaaaaaaaaaaaaaaaaaa

SEQ ID NO: 926 - DNA, 428 bp, Ctenocephalides felis
taagttgtccctaaattctttcaaggctccccttgcgcattttccgacttcacggactaagttgcccaattgggaccaggtttctttgagtgccttggccaagtcttttgctccttcgtgggcagcttggagaacccctttcaagcaaactctggcttcatcgacatcggctgcggtcacaacgcactccttggcttgtgctctgagggcttcggcgttctccctggcttctctccaggcggccaagccattttggcgaacttggttgaattcatcacgtttgtcatctctgcaagccttgaccttggcacgggcttcttgtgcgtagcctagagctttttggtgttggcctttaaggcattcctttgcggcttttttgctaagtttcctttcaacttctttgttgaactctccaaatctctatcgac

SEQ ID NO: 927 - DNA, 118 bp, Ctenocephalides felis
catcaccgagaagaactcttcggctacggaatatcttcattggaggcgcgttgttggtgcacgcagcattaacaaggttcttgcaattcagcataatgaccagaagaaaaatacaggt

SEQ ID NO: 928 - DNA, 489 bp, Ctenocephalides felis
catttgcaagaattatcagtgtaatccaaaaacaatcctgtccgcacgcaagcaaagggttgcgatggtcctggtcctggtggcggtggtggaggtgcagctgtcgccaagcactcggataaaggcgcttgcacgcattgtgggtaaagcgcgctgaagtatgtctgtccggcgcatgtaaaacgacccacgttgaaatttcctccagagagtctcacacattcaaaatatactttgcatgttttgtctgctggatctgcaaatgagccgctctgcacgcagctgtatatgggcggcggcgtaggtggttgccaaggcgctggaggatttcttaggcactccgaaagggaagcgaccacacattgctgatagaagtaagtagaaccaaggacaattgtaacgcgctacactgaatcctccgcctgctttcaaagcacatttgtagtatcctttgcaagtgctgtcatagggatctataaacatcccttc

SEQ ID NO: 929 - DNA, 409 bp, Ctenocephalides felis
gactcgtaattatatattaagtcagtttggagaacatactaaaaacactaatgatataatcgtaagtgaaaggaaattctcaataaatggtgaaattctagctagtgcaaaggttaatttaggtttggctatgtcacaggaaaagtttttaagtattaataatttcattttgatattacaagaaatattattatctgtgttgtttaatgatgataaagggaatcacattgtatagattttcaggaactgtcaaatgacaggcaaagtataatcatgattaatgataaaattctaaaaagcaaagggataaaacacccttaatgtgcacttgcttattgcatttgactattctgaaagagatgtcaatagctaatgtcttattgtagatgctataagaaaactattaagt

SEQ ID NO: 930 - DNA, 349 bp, Ctenocephalides felis
  misc_feature (319)..(319): n = unknown
  misc_feature (325)..(325): n = unknown
  misc_feature (330)..(331): n = unknown
  misc_feature (336)..(336): n = unknown
taaaacgaactctagaatattcaaacttagctggaggtgatacttccaacatgaaatatattgagctaaaattaatccaaagtaaaaaagatatagaagatccacaattatgctgtaaagctgaggtagtatcttgatatgtgaagttcttgaacataattgtgttcttaaaaatatgaaaatttgtgtatttatatttaaagtcaacttattttctaaaaattacgatagcttataattatgtgttatgtgaatatgattatcaattgttaaatcaatgtattctttatatgttactattatatattattaaattaanaaaaanaaaannaaaanaaaaaaaaaaaaa

SEQ ID NO: 931 - DNA, 382 bp, Ctenocephalides felis
taaaatcttgtggagaagaatgtgtcattgcgatcaaaaccaacacagcccttgataaataatgtatttttcaacacattcaaaattaaaatactatgagaaccaattcaaactgtttaaacaagtttgacaaagttgtgtcgttgataatcctagttgatgtattgtctattaaaatcctgacacttcaagcattgtttatgaatatattgatcaagaatacaaggtttttaagttctctctggaatattttttgttcttccagagatgtttaattgacagttgtcaatcaattgggtttttcatagacatacattgtaacagtatgcttgttttaataaaatcaatcaaattaataaatatccatgattatgaattaaaa

SEQ ID NO: 932 - DNA, 313 bp, Ctenocephalides felis; identical to SEQ ID NO: 184

SEQ ID NO: 933 - DNA, 85 bp, Ctenocephalides felis
tttgatcaataatcttattgatcgcaaggtttgtgctgcctcgagtaaagtgcacactacgagaaaagttgccaaaggaatttgt

SEQ ID NO: 934 - DNA, 446 bp, Ctenocephalides felis
  misc_feature (429)..(429): n = unknown
  misc_feature (433)..(433): n = unknown
  misc_feature (437)..(438): n = unknown
  misc_feature (444)..(444): n = unknown
gaggagactttgtttaccgtaatggacaaccattcgaaattccaaaaggaaatttactattgaatgattaaatgtaatagattaatcaaattttagattattaaaattgttctattactacagtagcaacctcagcctgaaaattaaccgaacaaatttctaacccttatcaatgtatagattttgaaaaataacatagaaatactatttttttgatgactgtaataaaaaaatgtataaatggccatacctgaaaagatttctatgtgtattttttattaccttttattgctgaatggataaaagataaatacaatttcataagctcttggattaaattaattttgaataaatccataattataaaatatcaaattgaaatatggaactacaaaatgtatacgaaatataacttatataataaatganaacnaatnntgccgncc

SEQ ID NO: 935 - DNA, 491 bp, Ctenocephalides felis
  misc_feature (14)..(14): n = unknown
  misc_feature (26)..(26): n = unknown
  misc_feature (35)..(35): n = unknown
  misc_feature (118)..(118): n = unknown
  misc_feature (165)..(165): n = unknown
  misc_feature (198)..(198): n = unknown
  misc_feature (214)..(214): n = unknown
  misc_feature (224)..(224): n = unknown
  misc_feature (270)..(270): n = unknown
  misc_feature (280)..(280): n = unknown
  misc_feature (310)..(310): n = unknown
  misc_feature (313)..(313): n = unknown
  misc_feature (321)..(321): n = unknown
  misc_feature (324)..(324): n = unknown
  misc_feature (331)..(331): n = unknown
  misc_feature (338)..(338): n = unknown
  misc_feature (341)..(341): n = unknown
  misc_feature (346)..(347): n = unknown
  misc_feature (352)..(352): n = unknown
  misc_feature (356)..(356): n = unknown
  misc_feature (358)..(358): n = unknown
  misc_feature (360)..(360): n = unknown
  misc_feature (362)..(363): n = unknown
  misc_feature (385)..(385): n = unknown
  misc_feature (402)..(402): n = unknown
  misc_feature (406)..(406): n = unknown
  misc_feature (409)..(410): n = unknown
  misc_feature (428)..(428): n = unknown
  misc_feature (431)..(431): n = unknown
  misc_feature (433)..(433): n = unknown
  misc_feature (435)..(435): n = unknown
  misc_feature (437)..(437): n = unknown
  misc_feature (445)..(446): n = unknown
  misc_feature (461)..(461): n = unknown
  misc_feature (463)..(463): n = unknown
  misc_feature (473)..(473): n = unknown
  misc_feature (478)..(478): n = unknown
  misc_feature (482)..(482): n = unknown
  misc_feature (486)..(486): n = unknown
tttttttttttttntttttttttttntttgtacancatataacgttatatttcgtatacattttgtggtttgtggtccatattttaatttgctacttaacatattctatgattatggntttattcaaaattaatttatccaaacagcttataaaattgtatttancttttatccagttcaacaataaaatgttaacanaaaaatacacataganatcttttcanacatggccatttaaacattttttcattaagggtatcaaaaatatancaggcatggncatttatacattttttttagtatgagccancanaaaaatantanaatttcnatgttantantcaanntctanacantnananngatgttaaaagttaattttcangcagaagttgctactgnactnatnnaacaattttttcatccanaantngntnaacccacnncatttaatcatcacnantaaattccgnttggnattncgantgggt

SEQ ID NO: 936 - DNA, 323 bp, Ctenocephalides felis
  misc_feature (56)..(56): n = unknown
  misc_feature (67)..(68): n = unknown
  misc_feature (113)..(113): n = unknown
  misc_feature (147)..(147): n = unknown
  misc_feature (159)..(159): n = unknown
  misc_feature (256)..(256): n = unknown
aggtcaagagatatagataaatattttttataaatttcttccttgttatcaattanattattataanntatattagcaagtgtattaataattatctcgaaatattatattanaattaaagcagctcgactcacaatcagtcttganacaaatgtcggncgacatattgcttttacacaaatcgattcacttttacacgtggtgacttgttcatttgattcgtcatctcgcgcattgattcaaatctatcccgcanacttttggcactttctaattgtgagtcattattttcagtttgggcactcttcaagaacatttatcgt

SEQ ID NO: 937 - DNA, 386 bp, Ctenocephalides felis
  misc_feature (4)..(4): n = unknown
aggnaatggcaaaaactgtgtctagaactttgaaaaccaaaatttcattttacttattaacgttttcaaaactttaaattttgtttttatttatcaatcgatcaattttgtctttcttttttgtcttgaaacaatttagagacactgtaatttcacctagcacctgattctgtgattacattataattagaatattatcacgcggattattaacacaatttcatcgtgaataattaatataacactagaatacagaagacgcacgtgcatgtattttaaaatcatacacgcgacaatggtgggtggtttacaccatctgaatccggttcaacaccggatcaggtgagcgtctttgctaaccattaaagggtggaacaaggcggggt

SEQ ID NO: 938 - DNA, 385 bp, Ctenocephalides felis
  misc_feature (41)..(41): n = unknown
  misc_feature (51)..(51): n = unknown
  misc_feature (53)..(53): n = unknown
  misc_feature (78)..(78): n = unknown
  misc_feature (80)..(80): n = unknown
  misc_feature (82)..(82): n = unknown
  misc_feature (90)..(90): n = unknown
  misc_feature (114)..(114): n = unknown
  misc_feature (118)..(118): n = unknown
  misc_feature (133)..(133): n = unknown
  misc_feature (146)..(146): n = unknown
  misc_feature (148)..(148): n = unknown
  misc_feature (155)..(155): n = unknown
  misc_feature (160)..(160): n = unknown
  misc_feature (175)..(175): n = unknown
  misc_feature (177)..(177): n = unknown
  misc_feature (181)..(181): n = unknown
  misc_feature (191)..(191): n = unknown
  misc_feature (203)..(203): n = unknown
  misc_feature (217)..(217): n = unknown
  misc_feature (224)..(224): n = unknown
  misc_feature (226)..(226): n = unknown
  misc_feature (229)..(229): n = unknown
  misc_feature (272)..(272): n = unknown
  misc_feature (276)..(276): n = unknown
  misc_feature (282)..(283): n = unknown
  misc_feature (287)..(287): n = unknown
  misc_feature (302)..(302): n = unknown
  misc_feature (306)..(306): n = unknown
  misc_feature (308)..(309): n = unknown
  misc_feature (311)..(311): n = unknown
  misc_feature (313)..(313): n = unknown
  misc_feature (367)..(367): n = unknown
  misc_feature (379)..(379): n = unknown
tttttttttttttttttgccttagcatatttgcgagcctgngttcaaccanantatttttttatataacacataaagnanancaaagtanatattttgtatagtttcttttgtngagnacttcatcaatatantaatataatttangnttcctcncgcangttcccgtgttgcancnttgngtatcttggntaaataatgttncaatcggacattgntcaggancnggntcccctttagggcgtaaacacgtgaaaaacttccggcatgttncgtnggtctnnaaancacattttccacgtnctcngnnanangtttctctccttggggaaaactcggcgggttcttcgcattgcaatacggctccncttccagcaatncatacc

SEQ ID NO: 939 - DNA, 489 bp, Ctenocephalides felis; identical to SEQ ID NO: 329

SEQ ID NO: 940 - DNA, 478 bp, Ctenocephalides felis
  misc_feature (443)..(443): n = unknown
gttcattttgtatgaaactttcagtaagaagtaaggtatccttttgtgaatttgatggtctttctttcactgatccaaatattggttcttcgcgattaatatcaacatttaattctttttgttcattacttgtcacggttgttgaagtagtgattactgtattaatatcttgcaccgtgttaatatcttgcaccgatgatgctatctctggaacattgctaatatcttgaggttctgaaacgtcttttgatcccactgttggttcacatttagtaaattccaaagtaaactgtgtgacgggtttcattcgtataacttcgtgggttatgagacaaatcttttgagttttgttttcatctttaggaaaatcgtgtgaaattgatacgtcataaatatcaccaacttttcctgcaacttgcgatgtgtttgaagtcgttatagcnttcgaggtcctcatttcattgggatcaatagaagt

SEQ ID NO: 941 - DNA, 139 bp, Ctenocephalides felis
ttaaagaggatcaacaaaacatggaagacgaatcggtagtaactaatgttcgatctccgccgactggtatttggcaaccgattcctaatgttcctcaaatgccatggatgccacaacagatgatcagaccgactttggt

SEQ ID NO: 942 - DNA, 390 bp, Ctenocephalides felis
cgatttttttgtttaattttttgcaaaaacaaaagtcagccactttcggcgtgcatcatttataaatgattcgacaaataaccaaattcctcgaagacgtctccgcgagtgcgttaaagttccaacgggaattctacaaggcaaaatcgaaagagttcaggatgctccttcagcagatctcgaggagcaggcaggggacgatttttaagaaacaaccggctctgtggtgtctggtcggatgtctagtaggtggttttagtctggccactctcagcctggcccgcaccgtcaagaatcacccggacgtctacctgatccgcagccactcgggcgaggagcgctactggcgccgatacaccaaactaatcgacgtcagcggatcgcgcaagt

SEQ ID NO: 943 - DNA, 274 bp, Ctenocephalides felis
  misc_feature (6)..(6): n = unknown
  misc_feature (51)..(51): n = unknown
  misc_feature (66)..(66): n = unknown
  misc_feature (69)..(69): n = unknown
  misc_feature (93)..(93): n = unknown
  misc_feature (95)..(96): n = unknown
  misc_feature (103)..(103): n = unknown
  misc_feature (115)..(115): n = unknown
  misc_feature (138)..(138): n = unknown
  misc_feature (166)..(166): n = unknown
  misc_feature (176)..(176): n = unknown
  misc_feature (196)..(196): n = unknown
  misc_feature (225)..(225): n = unknown
  misc_feature (237)..(237): n = unknown
  misc_feature (264)..(264): n = unknown
acatanactaatgccgcgtttaccactgtcacagcaattccgcataaccancaaccacaaatatanatntgatgctattgttaaatgttcaananntgcacanattattccacanatctcgcatgataccatcacgantacaacgaattggaagctttcccacagnagttaataanagcacctattatgggaaatncaatcgcatatccagcttccaacattaanggaatgcatagnatgcctgttcttccattgtgtctttanactcggtcgt

SEQ ID NO: 944 - DNA, 598 bp, Ctenocephalides felis
  misc_feature (284)..(284): n = unknown
  misc_feature (377)..(377): n = unknown
  misc_feature (425)..(425): n = unknown
  misc_feature (478)..(478): n = unknown
  misc_feature (498)..(498): n = unknown
  misc_feature (513)..(513): n = unknown
  misc_feature (524)..(524): n = unknown
  misc_feature (530)..(530): n = unknown
  misc_feature (558)..(558): n = unknown
  misc_feature (562)..(562): n = unknown
  misc_feature (576)..(576): n = unknown
  misc_feature (582)..(582): n = unknown
  misc_feature (586)..(586): n = unknown
  misc_feature (590)..(590): n = unknown
  misc_feature (596)..(596): n = unknown
tatttttgcaataaaaaccagtaaccagtggcacacaaatttgtaatgggcatgtttcattatgatcgatcgtattttatattaagagcaattacattattaattaagatattacattctcttgaattacttcttattctttggaacctctaaaagttcttccagtagttcatccatagcttctatcaagctagtacgataattttcattgttctccatgagatccaaaacagtctgctttctcattccattaacagtacgatcaaactcctcagaatcgtggntcaaaactgccagtatttcaggaggcatttgagtaagaggcaatgtcatcaccgccaaaattttagcgcacaaacgcaaatcatccgtgctancatcaaactcttgttcaggaattatatcgtttacatccaaattttccntcgtaatgttttccacaaatgctgctctgtagaacctcttcaatcctggtagngctggtctctaaagctccanatgttgtcgatatanaagatgattgnatccanagctggtggattgttgtgcatcttggantcgncaagatgcattgtnaagtanacanttgnataganct

SEQ ID NO: 945 - DNA, 167 bp, Ctenocephalides felis
ctgcataccagtcagactgtttaggtgcaagtgtcacttcttccccatccataccatccttaccatccttaccatctttcccaaccttgccaacatcttccccaacagcaggatttccttttggccgaaaatctcttgatatgcaaacaaaaactggaactaaatgt

SEQ ID NO: 946 - DNA, 160 bp, Ctenocephalides felis; identical to SEQ ID NO: 452
  misc_feature (16)..(16): n = unknown
  misc_feature (136)..(136): n = unknown

SEQ ID NO: 947 - DNA, 193 bp, Ctenocephalides felis
cctattccgtcacctacgcctctgtcgaagtcctacaagattctgaggttggacaggctttcatcgtctccggaggaatcggccaatctgaaatccatttggctgttgtagctgacaaaattaagcaagtccaatatacctacgaaatctacgccattgtctacgtttaaaatccttaaatgactgaaattgt

SEQ ID NO: 948 - DNA, 413 bp, Ctenocephalides felis
  misc_feature (405)..(405): n = unknown
acacaattagcaataggaaaatctagccacaaatatttttaacaatttatttaatacttatgttctagaaatacaaagtgtaaagttcaaggtttgtatagcttaataaagtaaacattttaaaatgtaatgaatttatctgcaaatagtcaaaatcaaaattactatataatgattattgaaataatgcttttatagattgcatttcaatctgtattaaattgtatgtaaatcacagcacaagatctaacacacaattcatctaacagaaagaacaaaataattttaatgttattaaaaattacatataaaataacttttacaataaagtaaccttacatgagatgtgttgatttcagatacttttcatacaacagtgctttctgtataaacaatataatatanataacggt

SEQ ID NO: 949 - DNA, 237 bp, Ctenocephalides felis
  misc_feature (186)..(186): n = unknown
aaacctattaattacaacaattacactaaattaaattacaattaattcctaaactaacaaattcacttccacgtgtctgtcaaaaataaaatcactcacaaatctttaagcaaacaccatgacaagttcactcttgatgacaaagttcttatcttttatttacaattgtctttgcacaataatggnttatttaatttaaatcactttgattgatttatgtgatgttcttcatctggt

SEQ ID NO: 950 - DNA, 131 bp, Ctenocephalides felis
attgtctttggagtctcaagaactaattccagttgaaacaaattccagcagcgttcgtatttggcagcaaccattcatttgtccaagagttggactatttcgcgatccattggatcctacatgcaaaaggt

SEQ ID NO: 951 - DNA, 204 bp, Ctenocephalides felis
  misc_feature (196)..(196): n = unknown
  misc_feature (200)..(200): n = unknown
agaaagctgaaaaattagctaaggaagcatctaattaaatttataaataagtgttcaatcactgaccattcaaaattttaacctttttttacattatataaccacactttattcattatagtttatataatttaaaacaagtagaaaatccacaaacagctttgtgatcagtgattttactaaataaaaaaatatnaaanatca

SEQ ID NO: 952 - DNA, 598 bp, Ctenocephalides felis
  misc_feature (435)..(435): n = unknown
  misc_feature (540)..(540): n = unknown
  misc_feature (584)..(585): n = unknown
  misc_feature (590)..(591): n = unknown
tatgatgtgctaaagtgctttgtaattaaatctaaatgaaaatgggagattcaaaagcataaatgaaaaattaccctacttcccttgcaatttgcatcaaaactcattctttagagatttcgtttattaagttgtaaattatatataattaagagctaatgatatttataaaaaatattacacaaaataattcgtcaaacatttaaacaaaaatttgaactttccaatgtatatgtataataaagggaacattaaaaaggaccaattcaaaggaacgggatgaggctgacatggattaagtagaaaaaaagaatataattgcaacaaccggagatcttcaatttgggtccaagtctcaattcaacaaaggaatgttagtgaaattttgcaatagctatgtgaagatatgtttagctatgaaataaagcataacanactaagaaaaagttttcttacaacacagtgcagcaattcttattgcattagtcaaggaaaaaaaacataaatcgaagttgtccactgaagtggtttgaaactggntccattcataaatatttgatttatactttaataatcatagtgtnntagtnngtaatac

SEQ ID NO: 953 - DNA, 138 bp, Ctenocephalides felis
taattaattttaaaaaattaaggatagaaaccaacctggcttaaaccggtttgaactcagatcatgtaagaattattggtcgaacagaccaaattttaaaacttctgcattttaaaattatcttaatccaacatcgag

SEQ ID NO: 954 - DNA, 429 bp, Ctenocephalides felis
aagagtatctttcgaatgcaatcaaggatttatcctgacgggagatccaaggagaatctgtctcgatgatggctcttgggacgttcctgtttatggatatactgaatgtttacgtgaaatattttacactactcgctcagcatggttaactgccggaatcatctttgctgttatggtacctcggccgcgaccacgctcgagcggccgcccgggcaggtacggaagcaccttaggctgtgcaggacatgtaactgtatagcattttgtgcccagagccataggtccgcaattatgacgtaacggatcatatgcaaaatttgcggggcaataatattgggttcctatactattttcgtcacaataataatagctttgacaatcatttatatttggataaaatctcgatggtgacggacatttgaaaccttg

SEQ ID NO: 955 - DNA, 296 bp, Ctenocephalides felis
  misc_feature (5)..(5): n = unknown
  misc_feature (28)..(28): n = unknown
  misc_feature (60)..(60): n = unknown
  misc_feature (82)..(82): n = unknown
  misc_feature (88)..(88): n = unknown
  misc_feature (92)..(92): n = unknown
  misc_feature (132)..(132): n = unknown
  misc_feature (136)..(136): n = unknown
  misc_feature (172)..(172): n = unknown
  misc_feature (190)..(190): n = unknown
  misc_feature (200)..(200): n = unknown
  misc_feature (236)..(236): n = unknown
  misc_feature (245)..(245): n = unknown
  misc_feature (256)..(256): n = unknown
  misc_feature (267)..(267): n = unknown
  misc_feature (272)..(272): n = unknown
  misc_feature (286)..(288): n = unknown
  misc_feature (291)..(291): n = unknown
  misc_feature (294)..(294): n = unknown
caaantataagataccggaaacatttanataaacgatatatgaatatttaatacatcatnaaaaagaatttattaaattaanagaaantggngatctacgtcaatttatctaaaatagtttttaggtgtaanaacnattagaactaattctatttgtttactacttttgttnctcgtatttaggttttgntttaaattangtatgttattttagaaagcactgataagtataaggnattgttganctgtattttanaagactgccangcaantcacgtttatttannnaanaangt

SEQ ID NO: 956 - DNA, 221 bp, Ctenocephalides felis; identical to SEQ ID NO: 328

SEQ ID NO: 957 - DNA, 126 bp, Ctenocephalides felis
tggcactgcttttcatcataatacagtcattagcgatgacatggtattctttatcatatataccctatgctagggatgctgttaagaaaactgtctctagttgtataacatagtctgcttagcagt

SEQ ID NO: 958 - DNA, 337 bp, Ctenocephalides felis
cgaggggcttatgaagctcactggccatctttcgaatgttttcagtcggtccgcttcgattttcatgtcaagattttcatcgtcgccattgtcgggcacatcaatgtccgcggactgtcctgtttcatcgcccgtttttgtaactgtttcagactttagattgattatatcgtatacttcgggtctcgtatcgattgttgtattgtttggaggcatttgtaatgcgtttagagactgttttgatgcacttttattgttaaaaacatcgaacactgggcgtgacgcgataactttgttacactttagcccaccgttaacattgaacgacacgaacagt

SEQ ID NO: 959 - DNA, 498 bp, Ctenocephalides felis
  misc_feature (60)..(60): n = unknown
  misc_feature (269)..(269): n = unknown
  misc_feature (377)..(377): n = unknown
  misc_feature (377)..(378): n = unknown
  misc_feature (394)..(394): n = unknown
  misc_feature (429)..(429): n = unknown
  misc_feature (439)..(439): n = unknown
  misc_feature (451)..(452): n = unknown
  misc_feature (455)..(455): n = unknown
  misc_feature (475)..(477): n = unknown
  misc_feature (482)..(484): n = unknown
  misc_feature (486)..(486): n = unknown
  misc_feature (494)..(495): n = unknown
acatacaccaaaatatctaaagctaaatatttggctcttacaattgataatttgtattanaagcatccaatgaagcatcttgtaaacaactatgcatctgtgaaatctatgttgattttgaacatcagattggggatgtcattgaaacaaaagttaaagacagattcattactgaaaatctgaaaaacaaactgaaggaatttgttgcacatttatctgacctcccaacatctttaaatatgatctagtattaagcataagaattcaanatatacaacctttccgttaccaatctaatgtagacaaaaagcaattactggcaatatttaaacttaattttgcatatggataagtcctattgtttagccaacaaacannaatgctgacaatctantatgtctgaaaaacatcaaaagctgttcttttggnaacacatcanacacagtattanncanacctttctataaagctctannnatatnnnanagttagannact

SEQ ID NO: 960 - DNA, 498 bp, Ctenocephalides felis
agcatttttggacccttttcaataagagaaaattttggtagtagttttatgacacaactctctggtgtgccccaatattgatgactttccttccattcgcaaggagatccaatacaaaatacatgcccctcttcactgcgcattaagactagagtaggacccttatatgataaaacatgatgcaaaaatctattcattcccaaaccgtgttcccttgaatcataaagtaatgcccaatgagaaggcacaacagatagtaatttagccatgaatgcttgtgaggctaaattaactccagaatcgctaggactagaagctttgactggcttagaatatagaggcggcaatgcacctgctagtaaccatgcaagcgatacaggtaatagtggaggttcaaccatttttccaaatggatttggtttatccaaaataggtgtggataattccaaacccaagccctcctcatgtgtgtcaatacctctgtatgatgtgcttaaa

SEQ ID NO: 961 - DNA, 414 bp, Ctenocephalides felis
  misc_feature (95)..(95): n = unknown
  misc_feature (134)..(134): n = unknown
  misc_feature (159)..(159): n = unknown
  misc_feature (250)..(250): n = unknown
  misc_feature (258)..(258): n = unknown
  misc_feature (281)..(281): n = unknown
  misc_feature (290)..(290): n = unknown
  misc_feature (314)..(314): n = unknown
  misc_feature (320)..(320): n = unknown
  misc_feature (344)..(344): n = unknown
  misc_feature (414)..(414): n = unknown
aaatggaataacactataatttctgttacattatagttaaagtgtaaaaaaaatgagtgaaaatatggcgtcccatattccttacaataattggntcacttacaatcagttataacatctgcatacaaaatgtnggtatttcaattttatacatacaanacaaatttcatttacaattttacgtagttattttattaactaattgataataaaaacccttttaagacacaaaaatgtgtgtgaaatttanttaatacntatgaaaatttttaaatctttantgttaacantgatttttttttaaataggaacancttaangcaacattgagaaaatcttcgacngctattgttatggttcctgtttgttgggaatctcgttgtctgaatgcttcctgtgagcctctgtatttgn

SEQ ID NO: 962 - DNA, 234 bp, Ctenocephalides felis
  misc_feature (8)..(8): n = unknown
  misc_feature (20)..(20): n = unknown
  misc_feature (37)..(37): n = unknown
  misc_feature (115)..(115): n = unknown
  misc_feature (118)..(118): n = unknown
  misc_feature (137)..(137): n = unknown
  misc_feature (143)..(143): n = unknown
  misc_feature (146)..(147): n = unknown
  misc_feature (151)..(151): n = unknown
  misc_feature (156)..(156): n = unknown
  misc_feature (171)..(171): n = unknown
  misc_feature (180)..(180): n = unknown
  misc_feature (183)..(183): n = unknown
  misc_feature (211)..(211): n = unknown
  misc_feature (213)..(213): n = unknown
aaaagtgntttaccatagangtttgtgaaagacctgngtgtcctcaacgctttatcagacaaagtcttagaactaacccctgatgaacgtcctagcttattcttcttccgcttancantaaatttcaaatcccccgnagaaancgnnaaanccaanactgaactcaccaanggcatcaancancttgagcgaagccttcgataaaacctananaggcaaagtgctgttcaccgt

SEQ ID NO: 963 - DNA, 379 bp, Ctenocephalides felis
taacctccaatgacgtcttaacacgtaaaacaaggcaagcagatgatgccccaaaagaacccgatttcaacctagctaaagaatacaacgactcctacccggtggtttttaacatcatcttatggtttggagtagcctttttcttctcgctactagctatctgtatctcgatctccacaatggaccccggaagggactccattatttacagaatgacatccacacgtatcaagaaggagaattaagtttgtgaaggagtgtttttaattgtaaatagattgtttagtattattacaatgcaacgtgatcaatattatttaaaaatacaatatctttgttgttacatatttgtttaacattcctcatattaccgaattgt

SEQ ID NO: 964 - DNA, 462 bp, Ctenocephalides felis
  misc_feature (83)..(83): n = unknown
  misc_feature (88)..(88): n = unknown
  misc_feature (90)..(90): n = unknown
  misc_feature (101)..(101): n = unknown
  misc_feature (107)..(107): n = unknown
  misc_feature (115)..(115): n = unknown
  misc_feature (118)..(118): n = unknown
  misc_feature (121)..(121): n = unknown
  misc_feature (140)..(140): n = unknown
  misc_feature (147)..(147): n = unknown
  misc_feature (151)..(151): n = unknown
  misc_feature (175)..(175): n = unknown
  misc_feature (214)..(214): n = unknown
  misc_feature (229)..(229): n = unknown
  misc_feature (243)..(243): n = unknown
  misc_feature (247)..(248): n = unknown
  misc_feature (253)..(253): n = unknown
  misc_feature (265)..(265): n = unknown
  misc_feature (272)..(272): n = unknown
  misc_feature (298)..(298): n = unknown
  misc_feature (303)..(303): n = unknown
  misc_feature (309)..(310): n = unknown
  misc_feature (312)..(312): n = unknown
  misc_feature (314)..(314): n = unknown
  misc_feature (327)..(327): n = unknown
  misc_feature (339)..(339): n = unknown
  misc_feature (345)..(347): n = unknown
  misc_feature (353)..(353): n = unknown
  misc_feature (358)..(358): n = unknown
  misc_feature (364)..(365): n = unknown
  misc_feature (369)..(369): n = unknown
  misc_feature (395)..(395): n = unknown
  misc_feature (401)..(401): n = unknown
  misc_feature (412)..(412): n = unknown
  misc_feature (415)..(416): n = unknown
  misc_feature (420)..(420): n = unknown
  misc_feature (430)..(430): n = unknown
  misc_feature (432)..(432): n = unknown
  misc_feature (434)..(434): n = unknown
  misc_feature (438)..(438): n = unknown
  misc_feature (440)..(441): n = unknown
  misc_feature (444)..(444): n = unknown
  misc_feature (453)..(453): n = unknown
  misc_feature (458)..(458): n = unknown
  misc_feature (461)..(461): n = unknown
atggtgcatggatgcatttcgctgatcggtaaaatacgcgatacaaaaaattaacaacgttgcgcgtctcgcgcataattacngttcnanaattctcaaanctttantcttctcntantanaattatgtgtatttagtcncgcgacnatanttatacgtttcgcgctatatatanaataataaagattcattacatactcaaattactattacnatatacattttgcantgacaaccatatcnttgnncatgnaattatattgtnactgtanattcaatacatttctctttatttaantttgnaactannancnaactaactattantactcgcattanatccannnttatanctatncctatnntcgngttttttacttttgtcatacactttncttttnttttacttgantannatcncttaaaacgntnanaatnannccnacatctatnttagnaanc

SEQ ID NO: 965 - DNA, 258 bp, Ctenocephalides felis
gtatatacaataatcaattgctaagatacatcaagcatatgtcatacatactgtccccaattttggaggttttctaaaacaattatgaatataatgtatttgttaccaaataatttgcatatggcaaccatatatgaagatctgtatattgttcatggtttcattccaattctgcacgactcatattcagacaatcatcctcgagctaatcctctccaccgactaatttaagagatttaagaagtgaagttatgtcgt

SEQ ID NO: 966 - DNA, 134 bp, Ctenocephalides felis
  misc_feature (3)..(3): n = unknown
  misc_feature (8)..(8): n = unknown
  misc_feature (15)..(15): n = unknown
  misc_feature (107)..(107): n = unknown
  misc_feature (121)..(121): n = unknown
  misc_feature (128)..(129): n = unknown
aanaccangaacaanacttaggaacacaaggttttattacccaccacaattttgctggacaaaaccctagccaaagtggtttcaactatcacaccagcaatttccangcaagggctaatanacactgnnaatgt

SEQ ID NO: 967 - DNA, 462 bp, Ctenocephalides felis
  misc_feature (22)..(22): n = unknown
  misc_feature (61)..(61): n = unknown
  misc_feature (66)..(66): n = unknown
  misc_feature (137)..(137): n = unknown
  misc_feature (367)..(367): n = unknown
  misc_feature (376)..(376): n = unknown
  misc_feature (406)..(406): n = unknown
  misc_feature (417)..(418): n = unknown
  misc_feature (428)..(428): n = unknown
  misc_feature (430)..(431): n = unknown
  misc_feature (436)..(437): n = unknown
  misc_feature (441)..(441): n = unknown
  misc_feature (446)..(446): n = unknown
  misc_feature (451)..(452): n = unknown
  misc_feature (456)..(457): n = unknown
  misc_feature (462)..(462): n = unknown
aaatatgaaatgtttccgacantcattaaaatttcttttattcaaatacaaaatgtagcanttaanaaaataatacaacaattaactgtcagccattttatcttctgagcaaaataacctttttaccatgtttatcnaaatttataaaattgacctttaaacctttcccgatttattaaaaatggatttgtatataaaattaaatgcgcaagcaggaggcagggataaaataattagtatatgagcagaactttgtgggacttcctgcagaaacatggacaacatcaggaagtaattgacaagttgaaaagtttggagtttacattcagctcattcaggaaattgctgcgtttgggaaaatgcatanatgttttcnactcttcattgccaactatacattacccanacccacaattnnaactacattngnnattgnncacnccttntttgnnttanntttan

SEQ ID NO: 968 - DNA, 470 bp, Ctenocephalides felis
  misc_feature (19)..(19): n = unknown
  misc_feature (44)..(44): n = unknown
  misc_feature (55)..(55): n = unknown
  misc_feature (150)..(150): n = unknown
  misc_feature (193)..(193): n = unknown
  misc_feature (212)..(212): n = unknown
  misc_feature (217)..(217): n = unknown
  misc_feature (235)..(235): n = unknown
  misc_feature (339)..(339): n = unknown
  misc_feature (351)..(351): n = unknown
  misc_feature (353)..(353): n = unknown
  misc_feature (370)..(370): n = unknown
  misc_feature (411)..(413): n = unknown
  misc_feature (422)..(422): n = unknown
  misc_feature (443)..(443): n = unknown
  misc_feature (459)..(459): n = unknown
  misc_feature (464)..(464): n = unknown
  misc_feature (466)..(466): n = unknown
tactttcaccaattacaangtaaatctttcaggaaatcaatcangaaattattantttatgagtataccgagttgctctatggacttaagatgttagacaaagttgtaaattatttaatttcaaacaaatttgccaaatatttcattcanattaaacaaaccattcaaaagttacaagaattttaaagttagnaaacattgcgacaacgtantgtcnacatcaatttaaaattantaatttttcagtataccgagttgctctatggacttaggatgttagaaaaagttatagactatttaattttgaacaaatttgccaaatatttcatttaaattaancaaacagtttanangttacaagaatttgaangttagtaaacattgcgacaacgtagggtcgacatcaagtannnattagtaanttatgagtataccgagttgantagggacttttggaancgatntngtgt

SEQ ID NO: 969 - DNA, 397 bp, Ctenocephalides felis
  misc_feature (336)..(336): n = unknown
atcatgctgagctttcaattcccaaaattggcgcatgtttcctaaaggctgagattttttatctttaggaattgatattccagataggtcacgatctgcagttttaacccaattctctagtctgtcacttgtgatgtcgtatgtagaccatgtatcacggaacgccattaatctgcgtaaatattcaccaacctcatcttgcaggtgtagcaatacatccattgcctcattgtgtgcttgctcaactcctggacaatcaactaactcttgaagtttttcagtcatcaaaaccaattgttgcaatttagcgtgatgatgagctatatctgaactcanagattgatataatgtgatgtattgatcataatcgactgtcgtaactgcagacaaatcaggt

SEQ ID NO: 970 - DNA, 340 bp, Ctenocephalides felis
  misc_feature (196)..(196): n = unknown
  misc_feature (285)..(285): n = unknown
gaatactggttcataaaatttagaagccctaatttaccgcctacggcgatatgatgatcagacatatgtccgggcttgtccaaaaatgtaaaatgcacatgggaattttccaatggcgtccacttatgaataatattgggaagtcctagcaattgcgttatcaaattttcctgcacgggttgaaaacaatccttangcatcttcaaatcatcccttacaattttaccctggttaattaatttggtaaactcgtcaccggatttgtcgagtgtcttaactttatcngcgatgctggttctgcacgcgtccaattttcggcgtgttttgtccaaatcttggt

SEQ ID NO: 971 - DNA, 135 bp, Ctenocephalides felis
  misc_feature (59)..(59): n = unknown
  misc_feature (83)..(83): n = unknown
  misc_feature (100)..(100): n = unknown
ttttttttttttttttttttttgtgccttcagattttatttaaatatataacataaganaataaaaacattgatggcttatanaattccaatcttattancaatgtccaatgcatcgtaatccctggctaaacgt

SEQ ID NO: 972 - DNA, 498 bp, Ctenocephalides felis
  misc_feature (13)..(13): n = unknown
  misc_feature (23)..(23): n = unknown
  misc_feature (42)..(42): n = unknown
  misc_feature (45)..(45): n = unknown
  misc_feature (67)..(67): n = unknown
  misc_feature (90)..(90): n = unknown
  misc_feature (136)..(136): n = unknown
  misc_feature (147)..(147): n = unknown
  misc_feature (160)..(160): n = unknown
  misc_feature (238)..(238): n = unknown
  misc_feature (245)..(245): n = unknown
  misc_feature (248)..(248): n = unknown
  misc_feature (257)..(257): n = unknown
  misc_feature (290)..(290): n = unknown
  misc_feature (309)..(309): n = unknown
  misc_feature (350)..(350): n = unknown
  misc_feature (358)..(358): n = unknown
  misc_feature (360)..(360): n = unknown
  misc_feature (371)..(371): n = unknown
  misc_feature (380)..(380): n = unknown
  misc_feature (392)..(392): n = unknown
  misc_feature (402)..(402): n = unknown
  misc_feature (404)..(404): n = unknown
  misc_feature (406)..(406): n = unknown
  misc_feature (412)..(412): n = unknown
  misc_feature (436)..(436): n = unknown
  misc_feature (442)..(442): n = unknown
  misc_feature (448)..(449): n = unknown
  misc_feature (459)..(459): n = unknown
  misc_feature (465)..(465): n = unknown
  misc_feature (469)..(469): n = unknown
  misc_feature (476)..(476): n = unknown
  misc_feature (487)..(487): n = unknown
  misc_feature (493)..(493): n = unknown
tttagctgcatcntccccaacgntccaaaatactccccccantantaatccaacaagaatgtgacanagtacacgcaattgtgcaaagtnaaagtctcgtgacgtgcacaatagcgatcgttttgacaatactgcnaattgtttganaaatgatgtcggntacaaagattccgatcttgctttcataactttctttaagctgcaagagagaggctccgtttcgccaaattctattcgnattgcancantcaagagcnggatttttgccacgagcgattgatctgtatgtntgttattatcacatttcanactgttgattcctacttcggcgtgatttctactccatttantttctgtnanctctaccagangatcgaggntttcgcccgttncaaacttgcnangntctaangcacaatcggctctattacaaaantgtggnattgannggccgaatcntctatngttnaaatcangtcacaagtgngcctangtata

SEQ ID NO: 973 - DNA, 305 bp, Ctenocephalides felis
  misc_feature (293)..(293): n = unknown
tgtctgcttctatatatttctccacaattaggacaatcaataacagatccagaccaagcatatgacattaaaccagcaacccacgaccctgcagcaagtggcccattattctgactagtatcagctgactgataatgcggtgttacaataacttccattccagacatatggcaggccttgcaaacataaactttattgccaaattgatgctgaaatctgcattttttactgttataatgcgattctccttgctgttcatggcccatgctctgtgcacatctttcgccacaagncaagcaaatggt

SEQ ID NO: 974 - DNA, 171 bp, Ctenocephalides felis
agaaaaaatgagccctgaccataagcaaagaccgaatcacttgagttttacctctgaacctgtaaatgtccataacaatagtcctactcatagcccaaaatcagcaactttatcgaatttaccgagacgaccgccagtagatgtggaatttatagatatttcatattcagt

SEQ ID NO: 975 - DNA, 498 bp, Ctenocephalides felis
tgaggtagaagaaatataataaatccaatacaggagatacgaatcttgctatttgccaatcgatgaagcaaatttcaacgggtttaccatcctgatatttaaacatcatattattattccaacaatctccatgtgaaagaactctataattttcagaacccgttgcattgaaacaactttccatatattcttcacaattatctttgattttcttcacattttcatgaaattctgtgatacctccgtcatctattgcttccaaggcttgtttcagtccaaaatcgcataaatcgtaaaaggcttctctaccggtcatatcatacatggctgagtcgatttgagtaattttatggaatttttcaggctgttgatctctcatgacaaaacttaatgcgtgatatttagctaatccttttgcaactaacgttatgtgagaaaaatccattttttttcttttgtcaaacattacaaaatttctggcgtgcaaatcttccaaaa

SEQ ID NO: 976 - DNA, 255 bp, Ctenocephalides felis
tgaagaagctaatcagcaagcaaagcaaaatgatatacaaaagaatcataataaaaatatctataaaggaggacattataaaaattatcaaagaggtggctatagaggacgtggaggacatcattccaggcgaatgcagaatcgaacaaatagtgatactactaacggggatagatgaagatggcttactcttttagtaaagtatatgtatcaatgtgaagcgataaagaaatatatcaagtcattataataagt

SEQ ID NO: 977 - DNA, 498 bp, Ctenocephalides felis
  misc_feature (479)..(479): n = unknown
  misc_feature (495)..(495): n = unknown
aagttttcgcagtttacaaatccagaagagataccagagcaacttcaacatcagatcaatgagtgcagttcacaattaagaatgtctagttcagagctaacaaagctgctatcgtcattatcaagcgtattgagcgatcaatcatatatccaacagcttctcgatatcaacgataccatcactgagatgtcagaagttgaaaattgaaagtcatcaacaaatgccatgtcatcaaagaatggcacgtcataaataattttattaaattctttttaaaatttatgtattattaaattgtaatgtctaatgcttcatattagtattaagttttcaaatttttatgttttttttttgtattgtattaatagtttacttatttttcttattttgatatacctggtaatttgtaacttataaagaagcttaagctcgtataaaactatctttatatttatcaatgcttatgtattttaaaacanaaataaaatgcttganagg

SEQ ID NO: 978 - DNA, 288 bp, Ctenocephalides felis
agaaacacacacacacacacatgctatatatattacaattataatagatgccccaaacccacatgcaattgactgttatttactaatagattttcatacttatttatttaacaaaacgctcttttccaattcctcctcatggttaatgtatcagcatgacattaaacatcaatggattttgaaatagtaaataattaatatttcagtcatttcataaataatcaacaggcaaactataaatcacacaaagggttgcgataatttaatagttttgcttgaatataatgt

SEQ ID NO: 979 - DNA, 498 bp, Ctenocephalides felis
atttatttttgcttaacaagaaactcatggacaaataaaattataggtaacatccggacgatataaaaataatttaaaaaatgtcactttctaacaatgttctagatttactaaaatattagttatgctttttatgtgctggattggcatgcaaaactctaccaaataaaaataagaaatttgaaaagaaacaattatttaaatttaatatatttaattaaattaaattacagggcagtaaatatctttcagcttatgttcttaattcaaaaactttattttcttttaattcaagatgtataatttgatgttgcctcttacaattctagtattctactaatatttttggattttgagttctctacatggtgcactactggtaacaacctggtgatactttaatggcaagtattaccttgataggatttccattaaaacattgtggcataagagtattgtttcactcatcctcagttgaattttcgacaaataaagttt

SEQ ID NO: 980 - DNA, 251 bp, Ctenocephalides felis
tttccgtaatgatgatggtgggcgcgacttccggaatgttcttgccggaaactttacaccaaaagttaccggaaacgctaactgaagctcacgtattcggcagggatcaggtgttctggagcttaccgaaaaaaggtgtatcaaagtctacagatacggccgtcaagaaattatcacaagaagactgttaaatagttataatttgtattgttatacatatgtttcttatataataaaattatatttattgt

SEQ ID NO: 981 - DNA, 351 bp, Ctenocephalides felis
tttttttttttttttttttttttgttgataaaacacaaatttattttacatgttaaaaattcttataaagtaaatacatcatccagttacacacgtatttatatatccatataactcgacaaagtagctttacacaatttggaaattgcaatgtgttaaaactaattgttttttagaactatattatattatattttggggaatattaaagttacggacctacaaaattaagactatgtaatgtattcttctttagccactgacaaatttaaataataaatcttgcttcgataagtaatttgaactaatatcgatgacttcctttcgtttttgaaaactaaaaactcttgt

SEQ ID NO: 982 - DNA, 224 bp, Ctenocephalides felis
aatgattttgtttgacaaatggtttttaaataaacaggtattcgaaattgatacgattgatgatgaagtagaaaaattctggaacagccatataataatagtccaaaatgtatttcatagtaaattacaaaaataattgattaaaattataaatctatgactgttcttgatatgaacctctttcataaaacatattaagatttgattcaaaattgaggtttaag

SEQ ID NO: 983 - DNA, 498 bp, Ctenocephalides felis
tacgagtgcacattaaacgctcgaggtgtattcgacgtggcccgatatgcttgtgcagctgagttatatttcaacagcgttctgcagcagtgcgtacctgcataccagtcagactgtttaggtgcaagtgtcacttcttccccatccataccatccttaccatccttaccatctttcccaaccttgccaacatcttccccaacagcaggatttccttttggccgaaaatctcttgatatgcaaacaaaaactggaactaaatgtacaaaaggagaagtttctaaagacgatttaaattctacatgtacctagtgagtgtgttatatgaaattgctattgcatattacatacaagcttaataaaggttatggtgatttatttcatttaaaggcaatgtatcggtttaatggttttaaatttatttttatttaatattaaatagattaattaaaaatctataaagtgataagaggctgatatccataatattattgaata

SEQ ID NO: 984 - DNA, 102 bp, Ctenocephalides felis
agaccaagtaaaaatctcactcacagcttttaccttattaggatcatttaaaaatctatctagaatgccaggttttgccagagattgctgcactttcttagt

SEQ ID NO: 985 - DNA, 204 bp, Ctenocephalides felis; identical to SEQ ID NO: 286

SEQ ID NO: 986 - DNA, 324 bp, Ctenocephalides felis
  misc_feature (30)..(30): n = unknown
  misc_feature (170)..(170): n = unknown
  misc_feature (210)..(211): n = unknown
  misc_feature (274)..(274): n = unknown
  misc_feature (289)..(289): n = unknown
  misc_feature (293)..(293): n = unknown
  misc_feature (321)..(321): n = unknown
gcgccggacgcgtcaaataaactaaattanatttaatttactaacaaacatttggtcattagtttaatgtcaataatgtgcattttacatctaataatttgaaatcattaatggtcataaatcttcgaaaagttgatggcacttcatgcttcaaatcgccaacgacatancaagctcaagatgcaatattaaactatgttgtaaacatannatatattattgaaattttataaagaggacttttataatcgctcaaagtttgacttaatacaanataaattatttctcnttantatatttttatattttaaagaaaatgtntgt

SEQ ID NO: 987 - DNA, 498 bp, Ctenocephalides felis
  misc_feature (305)..(305): n = unknown
  misc_feature (307)..(308): n = unknown
  misc_feature (310)..(310): n = unknown
  misc_feature (314)..(314): n = unknown
  misc_feature (366)..(366): n = unknown
  misc_feature (418)..(418): n = unknown
  misc_feature (427)..(427): n = unknown
  misc_feature (477)..(477): n = unknown
gtgagttagcacacaaattagtctcagattcgatcccaacctctgtcgatcctatatcagacagcacgagaaaattttcacaaattttatagatctcaatttaatttcaagtgaaaatcgccttgatgccgataacaagctgcatataaaaatattaagttaaaacatattattagatataatcataatatgtcgcaactagtatagagcaactactgaataacattccagaaatccagaaacaagccatgcaataaaatttcaatacaattactgaatgtcctcataatatgaaaaaaaaatanannanatantataatatataatcgaagtaaatattcaattaacgaaataaaatcgtaacanagaatttgagagaataatttgcactatttatatggcgatatggcgttgtcantagtattcnctgtatagaatgatcaatctgataagaatgtcacatattaaattatttanttgaaaatttatatgaatccc

SEQ ID NO: 988 - DNA, 420 bp, Ctenocephalides felis
aatctgaatttcatgaattttggaaaaattagtcatcataatttcaaaatttgtctttgacaactttaaaggtagctaattctcacttcctattaacttgttttaggacaaaactccacttacacctagtttgaactacaaagactactatatatacaaattgaattttatgatttttgtataatttataaattcaaaattcaaaattttactctgccaacttcaaaagtagctgaatctcacttcctattaacatgtcttaggaagacaaaatttcacttacacctagtttgatcttacaactactatacataaaggctaaatttcatgaattttggaaaaaatgactctcatcattatttcaaaattttacttcgacaactttagaagcaattccacttactggtttgacctacaagt

SEQ ID NO: 989 - DNA, 500 bp, Ctenocephalides felis
  misc_feature (29)..(29): n = unknown
  misc_feature (442)..(442): n = unknown
ttttttttttttttttttttttttctggnccatacaactctaagctttccaacatttgtattttattcaaataaatataaataaaaatcataattcgacaattttacttgtatttatcttaaacatatttacagtatttcctcaaaaactgttaaatacaataagttaacttaaatacatggatgttctgagaatgtggatgagctcaagattgtagaactgagtttgatctacacaatttttgcctaaaaggttcgactactcagaaagcagccacccgtgattccataccgcctcacatttgacaataaaatatatgtataatgttaaataggattttaatggaaaaaagccaatttaatactttagcattatgaatatgtatttccaaattagtctataaccgaatttaacctaaaatacaggaaatacatattcatanatatacatatattttaatacaaaaaggtaacttgtgcaaaaatgaaattcaaatacac

SEQ ID NO: 990 - DNA, 498 bp, Ctenocephalides felis
tctttttcgatcattacgccagtagtatcttgcataattatgttaacaatattgttacattttataaaataatcttactattatctatagaacaatttataattttatatatatcaacattattgtttattgctagatattagaatttgtgtatttgataaatgaatgttggtttgtgtaaatgatatataattgcacgattttagctcacaaaagtttgcttagatatttgaactaaattatggacagatcgatacctagatccataacaaaaatttatttaaatttcaaatataatttttttttgctgcatgctgaataacatctcgcattatcttttgaaatcgtttctttgttgctaaatctttaaattctaaacacttttgtaaagatccatttccatcgaatgcattagtcatgtcttgaaaatctggagctgtttcagtattcgcggaaatgaaatttagagcaaaactacataaaactactccaaagtgt

SEQ ID NO: 991 - DNA, 498 bp, Ctenocephalides felis
tttgctcttcatagttcaggtctttataagaccagtatgcaaaatcagcttgtgcaactgcaaaatcaacatcctgtgaaaatactgccagagcgttattttcttttgcatatgttatgatttctgagtcacattcttcaaatgtggatctaataacattacatttattttggaagctacacattatgacctcaccgatgttacaagctggctttatattatattcattaacatattccaaaccattatcatctaaagtatcgaagatttcataaatagccatgatatcagacctttttcgagctacccatctatcctgcatatcatctatgttgcatccatcaaaaaatgcaactaattccacatcaaacctttgcaaaaattctatgaattcaccagctttttgcttatacaatttgtattgacctcctgtcaaaaattttttttggtcagtctctctaaatatttgtctagagcaacttccatcgatcactatga

SEQ ID NO: 992 - DNA, 498 bp, Ctenocephalides felis; identical to SEQ ID NO: 509

SEQ ID NO: 993 - DNA, 235 bp, Ctenocephalides felis
aattgatccataaattatgattaaaagattaagttacttaagggataacagcgtaattatttttaagagaacatatcgacaaaatagattgcgacctcgatgttggattaagataattttaaaatgcagaagttttaaaatttggtctgttcgaccattaattcttacatgatctgagttcaaaccggtttaagccaggttggtttctatccttaattttttaaaattaattagt

SEQ ID NO: 994 - DNA, 72 bp, Ctenocephalides felis
atcgatctttggcggctaaacatatcttgctgagcgaagccggccgtatagaaatatgtggctttaaggaaa

SEQ ID NO: 995 - DNA, 206 bp, Ctenocephalides felis
aacagacattagtcaccacgcgctcgacgaactttgattttttttccgaacgacaatcaagtaaactgcacataaaagaggagatgagatttaatttttgcgtttaatgtatgtaaatacttttaatcttaattaatttttgtcattcggaattaaagcagtcacttgatggtctattgcacggaccgtagtaaactgcgccgcgt

SEQ ID NO: 996 - DNA, 260 bp, Ctenocephalides felis
aatggtgtaaaaactgtaaatatcccatttgttgtcaccagccattattgatgatttaattacagttatgaaactgctgatgctatgagaattaaaattgaccaaattattgttttattttatttaaagataaatacatatatttaaatggaaattcgtggctctatgtccctaatgggacttctattatccataggaactgctacaggagtgatattcacgttagaaccagaggataggatttcattaaaaatgggcgt

SEQ ID NO: 997 - DNA, 310 bp, Ctenocephalides felis
ttcggccgtgttcttcatcctaagatgagctcgggccaaggatgcgcaatcgccttgggaaacgacgacctttaacgaactgtcgtccaagcgcatcacgctgaaactatgactgtcgtgggttgatggcgaactcattgttgaaccttacaaaaactcttaacttaacaataaatactgttcattaaaatcaataaattatattaaaactaaaagcgatcgaaaaaactatttttttttaatttggtaaaacaatcttaaaagattgtttagaccccggaagaaacagtggtttgttactgttgtcaca

SEQ ID NO: 998 - DNA, 59 bp, Ctenocephalides felis
tcctggatgagcgttttgaaattctgtcattttacttatgatatcgggaaaccacatgt

SEQ ID NO: 999 - DNA, 498 bp, Ctenocephalides felis
  misc_feature (102)..(102): n = unknown
  misc_feature (235)..(235): n = unknown
  misc_feature (387)..(387): n = unknown
  misc_feature (405)..(405): n = unknown
  misc_feature (411)..(411): n = unknown
  misc_feature (418)..(418): n = unknown
  misc_feature (424)..(424): n = unknown
  misc_feature (449)..(449): n = unknown
  misc_feature (479)..(479): n = unknown
  misc_feature (482)..(482): n = unknown
  misc_feature (489)..(489): n = unknown
ttgaaactattcattttaaaataactgtgacaatctcatattatattattcacatatttgtatgctaatatagatcttatatattatattcatttttacaangatgcttctttagaaacagattttttttcaaacagattttttaattgtctttgaacatttttcaaattttcttctttaattgtaacaggtagtccacattctttctgatccttcatgatttgttccataatanaaatttttctttttagaaagccttcttgctctgcttttaataagttttcataggctgccaatcttttagctttcaactcatcacaatatatattagttagtttttgcaatgattctttcctcgttatccagtgaaaatgatttggtggtggnttatatacaatattcaanttttcnaatatcnactcanatcttttgtagtcccatctcctaangtatttcaaaaatttcttacgttatcaatnaantctttangtaaagccg

SEQ ID NO: 1000 - DNA, 231 bp, Ctenocephalides felis
gcaatcatgcaacaataataaagtatctatataatatcttacaaattgtacaaagttaatcatgaactaaatgtaatcctactaatataaatacaaaacttgtataaaatgttcgaattagaattttggtaaagtgaaataaattctctataaaactaaaaaaaatatttttgcactgtatcatatattccattgactcagaactcaaagactataattgccgaatcacgt

SEQ ID NO: 1001 - DNA, 247 bp, Ctenocephalides felis; identical to SEQ ID NO: 233

SEQ ID NO: 1002 - DNA, 297 bp, Ctenocephalides felis
cacctatgtataattttatatatatatatataaagaaaattaaatctcactcgattttaaagataataaaataaaataaagttacatttataataatgtaagattaaattgtaaattctaatttaattatatttcaaattaaatatgttaatgtcgaactttaaatgcaatttcatttatattgcacgatttattttgtaggtcttgagtaaggggagctacgataacgcgtatcgcgggtgctcacgtgacggctagttagagacggttcctcaacacggcccttagaggagctgt

SEQ ID NO: 1003 - DNA, 498 bp, Ctenocephalides felis
  misc_feature (490)..(490): n = unknown
acgcgttgattaattttgcgaggcagcaggccaagccatttctttttaattagtagctaattagacaaaaggttttgtcaaaaatcctgagccgatttcgaaaattttcaactttttcaaaaatatctgtttggtattgcttccccgtagttacttgttaaaataaattaaaatagtttgacaattttgtagaaaaaatatttcagatttgtaaaaaatattttaataaagtattgaatggtcgtggacgatgacaaattttcaaacttttatgttcacaattttaaaatttgctgcatctcaattcttgtagattaaatacacatatctgaaagtttttgcaacttgtcttaagccactaaaatgccacttacacctagttaatataagccaaacccaatttgtaaataagtatacagaaaaacattccaaattttatagataatacataatctcagattatttaagtggtttagaatggttgccaggnagaactaa

SEQ ID NO: 1004 - DNA, 498 bp, Ctenocephalides felis
tcgttgatttagagttattgtattacattacaataaattttaatttttagataaattgacgtctttttacatatgtttggaaaatatctgtattagaattttaattacatactatcacaaattaataaggtgtatataaatatacagagaaactataatttgtttaaattttatttcgtgtcgcttcgtttcaacaaacaagcaaatttccatgaacaatttattggcaacatttatacaaatagctaaaatttattctatttttgaatatcatgaatatttaaaacttaaattattttattataacgatatacaattattaactttttttatatacctttacgtttcaaatgtttttgaatattttggcataccttaaaaaaattgatgtatgtgtgtgagtggatgcggatacaaattttcgggaacaccgatcaaccgatttaaataaatcaaaatacattcgaatagtattaggcaggtctagtcgttccaaaa

SEQ ID NO: 1005 - DNA, 498 bp, Ctenocephalides felis
  misc_feature (456)..(456): n = unknown
aaatctcgatagttacgcgactcataaataattatttaaacaatgaatgttaaaaaaaattaaagtttgtaaatataatatatgtattggattaacttagttaattctccctcgcaattttatactatagtaaccagaaacaaaaatcagagtgtgtaaaatgtaaattcatatatttttggtaaaaatacaatcaagatataacagtgccacaatattattaaaatacgtatttgtgacgaaacctaaagtgtagtcagaatataaaaaacaataatatttataccttcaaatgtatgctttgaaaaaaagcattcgaagattttgtttaaatattttgttaagtccacatttatgtttgttcgttcaattaaattatgtttcttttgcaagtaagattatgttgtagatattgtcacaaaattagtatattttatgtaattttaagcatattgntattttttggaaaatcggactattgtcaccaaaattaaataa

SEQ ID NO: 1006 - DNA, 67 bp, Ctenocephalides felis
tattcgtagtatcaatgaagtcgtccgccctaagcattgatgaattttggacaacgtagcatattgt

SEQ ID NO: 1007 - DNA, 498 bp, Ctenocephalides felis
catttgatttgattatattcttgagtttatttacttcatcataacagcaacataaaggatattccaaaaaatatgtgcgaatgaatttgatagttttcatcacctgtggatgtccaatatcgttttttaaatttttctcacatagtgtagtaagtcctttaagaaagtcattcgacaacgttttggattttaattccaataacagataattctctggatagttactcggaaattgtatgcacaaaataattgtattaaatgatgtcgtgctaatttctacacgaaccatttctccgacacaagtaataagctttgtattatccaaagttttctcacatagttgtcgaactgttttaagttcatcgtctaatgcagccatacttcgttttctctgtataatgtgttatataattatacagcaacaaatgcagctgtttagaaatttttagtgaatatgagtatgatatattctttagaacatgtaagctaattagatta

SEQ ID NO: 1008 - DNA, 95 bp, Ctenocephalides felis; identical to SEQ ID NO: 917

SEQ ID NO: 1009 - DNA, 406 bp, Ctenocephalides felis
gtttgctatattagttcggcggtaagaaatatttttttaatagcttgatgaaaacaagaaaatatttaatcgagtgattttaaatataaaaatatatatatagaattatatgacaacaaaaaatgagtaatgtagacgtcgtcgtgttttcgtttcttgtcattttatttaacatttcttacgcttattacatattgttgtatatacatacatatatataaattaatagaagttttatcgaaacgatattgatgaaatgtgtcttgtaaggttttttttaattacgaaaaaaacaaaaaatgtgtgaaactgtgattcctgcctttctcgtgtaaaacggcgatgctagaaaatagaaacattaagcgttctttccatttaattaaaaataattactaaaaagctg

SEQ ID NO: 1010 - DNA, 84 bp, Ctenocephalides felis
taattaattttaaaaaattaaggatagaaaccaacctggcttaaaccggtttgaactcagatcatgtaagaattaatggtcgaa

SEQ ID NO: 1011 - DNA, 228 bp, Ctenocephalides felis; identical to SEQ ID NO: 560
  misc_feature (55)..(55): n = unknown
  misc_feature (67)..(67): n = unknown

SEQ ID NO: 1012 - DNA, 245 bp, Ctenocephalides felis
gggtggatcattccaacctggtggtggtgtagggtttgctctacttggcatttgagtaggaggtggtgcttgcggttggaattgattgacaaaacctgctccttgtggtgaattcaacatagggttaagtagggcatttgttggttgaggttgagaactaataggattcagaagacttgctggttgttggaattgaccagacattgtgctcatcgtaactgtattggcatttacaggcgaattgt

SEQ ID NO: 1013 - DNA, 351 bp, Ctenocephalides felis
atggaataaataatgttggcccatatatatccaatttattattaaaataaattcatgatccacggcagaccttaaatttaatttgaggtcatttaaaacatttaaaatttattcgattaacaacaatttttagtagtaggttagtttaattatgaatcacaatatagaattagcacatgtatttttgtgagtatgaactcacaccaataaacctgaattttaataatgtttaaggatataactaggtttatgattacattgctacagcaatcatttgcgggcagtttggaattgtgcatggttcagcactcttgtatttgttgcctcttgttctagcttcataatgatcgt

SEQ ID NO: 1014 - DNA, 496 bp, Ctenocephalides felis
agcactgccagaaacctgtggctcatattcaacagccccgcaagtagatacaggtctttttaacaagtctcaagttataattcattgttgttattgcaataaactttacctttgatctctttccaattatctataaaaattcattccaaaattactgcaattatttagagtcacagattaataatcttaaaaggtttcgagttagtgtgttacattaagattttctcatgcttgacagaatcttagtttttctttggttgttttataatttagaaaaaaggtgaaggtgtgatttgagagattgtaaatgcttggcactattctatgagatgtataaaatatatttttaatattttaatgatttatatttaaataaagtgttacatttaataataatgtatataattgcaatacgtttgattacattttttagttttccatatgtaactttatatttgaatatttaatacattgcaattaaaaaaaaaaaaaaaaa

SEQ ID NO: 1015 - DNA, 194 bp, Ctenocephalides felis
atcctttttttctatgaacggttttaggtaacggagaataatgtaaggcatcactaaagtcgtttttatttgtgatttcatgattaggctcgggtcttctgacccgcataaattgaccccgcaattttgcttcctttgcctcgtttgatgatacagcccgccaatccaaaaataataattttggtaaatgatgt

SEQ ID NO: 1016 - DNA, 401 bp, Ctenocephalides felis
tatcatcaacagcaacactgtgaaccttttttcttctcacgacaccgtttatcgcggcatcattggtcatatccctatcaatagatgtcgaatctaatggcaggtgagtaggtctgggaggagcagacatagacctttccaaaagttcttctgtcggttcaacgttcattttcattaaatccctcatccgtggaggttttactggaggcgtgctattaccttctgaaggtattgtctcataaatggcttccgatgatgcacttgatgccactgtttttgacaataattcattgtcattaatgactgcaggttccttttgggcagctatatatgactcagggcgtattcgatgtgatcgcctcgattctgtcgtcgtctgagattcagctgaatgggaacgt

SEQ ID NO: 1017 - DNA, 422 bp, Ctenocephalides felis
  misc_feature (23)..(23): n = unknown
  misc_feature (26)..(26): n = unknown
  misc_feature (65)..(65): n = unknown
  misc_feature (139)..(139): n = unknown
  misc_feature (151)..(151): n = unknown
  misc_feature (187)..(187): n = unknown
  misc_feature (199)..(199): n = unknown
  misc_feature (218)..(218): n = unknown
  misc_feature (231)..(231): n = unknown
  misc_feature (247)..(247): n = unknown
  misc_feature (321)..(321): n = unknown
  misc_feature (334)..(334): n = unknown
  misc_feature (378)..(378): n = unknown
  misc_feature (387)..(387): n = unknown
tactgatttcaaaaacaaaatcnaanagaaatatactatgaagttcaactgtaatgggacttagngcaaataaatgcgagggagtgagagaaagagaaagagaaagagagagtttgaataaattatattaactattgcnagaaaaaaagantttaaaacaattatgttaactaatgacaatatatgntccattcatcanatccgaaagactgcacaanatacttattctgnaaagatggtaaaggtnaggttttcgaatgcccacctaactatgtatatgatcattctaaaaatatgtgtaaaaagaaatcagtcagaagntgattgcaccgtnatgaaatgcacaaatcccaattctttataacctatgcaccgganccatcaatntatgctttgggcaatgacaaattgcaaccgatcgt

SEQ ID NO: 1018 - DNA, 233 bp, Ctenocephalides felis
taattaattttaaaaaattaaggatagaaaccaacctggcttaaaccggtttgaactcagatcatgtaagaattaatggtcgaacagaccaaattttaaaacttctgcattttaaaattatcttaatccaacatcgaggtcgcaatctattttgtcgatatgttctcttaaaaataattacgctgttatcccttaagtaacttaatcttttaatcataatttatggatcaatt

SEQ ID NO: 1019 - DNA, 459 bp, Ctenocephalides felis
  misc_feature (233)..(233): n = unknown
  misc_feature (395)..(395): n = unknown
cctaaaaagcggatttggataaaatttgctggttgtatgggagctgcctattcatcctcgaggaaaaatagaattagcttggattctcacacgtgagcaaaacccatcgtcggaattaatgaaagaaatttggacatatgtgaaaaataatacacccatagatgttgacaaactaaaacacaccgagcaaaattgtggaaaggatttctgaagataattactggatataaagnccttttaagatcagctttatcaaaacaactgatgtttaagaataactaaatatattatacttaatacttagcttttcctggcaatactatattaaaatattgacataagtgcattaatatttttgcaatagatttgctttttatattcaatatataatatgnattaataataaaatcttctaacatcaagtgtataaatgcattaattttctcaaaaaggcttatg

SEQ ID NO: 1020 - DNA, 477 bp, Ctenocephalides felis
cttgaatttgataagtgaagcaattagaataaagtccgaacttttgcttagatttagagatgcattgatgagaccagccttgtctaaagcaaagctttccttggaacgacttgaaaaggctgtttcaatggctattgatgatgctagacttaaatttgaaaatgccatccaagaaatgaatgacgacgcagtaggcattcttaattccatcactgaaaaaatccaagaggaaaccgaggagatcaaaacaaatattggaggattactattacaacaaatgttcgatgattctgcccgtcaatgcttgagggatcaattggctgcagttaaagttttggccaattcaacaatcaacgatgcaaattcatgtattcgtcgtcaattatttggagctaatgatttaagtgataatcttggtgcaatatttgatgaagctttcgaaggtgttcaagaattagttgatgagctaaatgattg

SEQ ID NO: 1021 - DNA, 433 bp, Ctenocephalides felis
  misc_feature (35)..(35): n = unknown
  misc_feature (264)..(264): n = unknown
  misc_feature (295)..(295): n = unknown
  misc_feature (309)..(309): n = unknown
  misc_feature (338)..(338): n = unknown
  misc_feature (370)..(370): n = unknown
  misc_feature (433)..(433): n = unknown
ccatgttggtaagatttattattttatatcccttncaaaaatctgcacgttgttcacaaaaaaaaatcataaaatcttaaatttatttgcaaaaaaaaaaatagtgcgggaggagtgaaacttcgtaaataaaactgcaaaagttacattgataatttacaataaattcagacagtttgcaacgtttctagaaaagttcagaagttttgaaacaaatttcatcattttcaaccaaatgctttcttttctatttacctttaaagnttcacttcaatatctccctataatattttgntacaagagtgttgntttaagatttatagcatattacaaactgntagttatattattttctacttatcggtaatgnttcctttttttggtaatcagtttacaaaactttctgcaaaaagttgtgccatcaacaatttgn

SEQ ID NO: 1022 - DNA, 319 bp, Ctenocephalides felis
atttatttgttgaatattttatatcaatttatttttgataattattttgataagctcaatttgttctttgtgacaataatttaggcatataaaagaaaaccagtaaaacaatacaataaaatcaccaacaattagtttgtttttcttctgtgttattaatcatcagaacataaataaattctataagttattttgatatacattattgactattagatacaatttattgaatcaagttaattggtcgtaattttttactatttttatatttgtaaataataaattaagatcttgcttttagaagtcttcaatgtatagt

SEQ ID NO: 1023 - DNA, 518 bp, Ctenocephalides felis; identical to SEQ ID NO: 513

SEQ ID NO: 1024 - DNA, 112 bp, Ctenocephalides felis; identical to SEQ ID NO: 236
  misc_feature (58)..(58): n = unknown

SEQ ID NO: 1025 - DNA, 304 bp, Ctenocephalides felis
  misc_feature (58)..(58): n = unknown
atatctagccaatattgcaaaattcttatcagtgcatgtgaaagaaaaactattattntcgaaaatatatcaatattattataagtaaagaaattgtcattccgaatgaacttctgaggtctaaagacccattacacaagtcagtgtcgcacatggtgcaatttagatcccgggctcctttatttgttaaatctttctttatttcttcacatgtgactcgggcagggacacattctctaatcacacctttttcaatcatggatttatagaaaactctttctccgatgtctgttgtacactagcg

SEQ ID NO: 1026 - DNA, 498 bp, Ctenocephalides felis
  misc_feature (296)..(296): n = unknown
  misc_feature (372)..(372): n = unknown
  misc_feature (428)..(428): n = unknown
  misc_feature (432)..(432): n = unknown
  misc_feature (438)..(438): n = unknown
  misc_feature (444)..(444): n = unknown
ccggtatgaaaaggaaagtgcttttacgtccaaaccgtggagtttccaatatgccacatgtcattattcgtttactattcttatccttaatatttatagcactgtcgtaataattctttgtaaaatgagccatatctctgttgagagtcataccgtaatcatatcgacattgatatgattctccacataaatcttcagcacgattgatgtcgctacttctgtttgatggaagaaaatctttaggttctttaacccagtttggtataaatgaggaatttgcataataactggctgtncgaccaaattcacgagtgaagagtgccgctccgaggtgttcattttcacgatccgcagcatccagtgacgtgcganatctttatgaacagattcaaaactattgagattaacaggcacaaaagttccatcanggtngacaanagcgantgccatatcccaactccaatttccgagtagaccagcagtttattaataaatgcc

SEQ ID NO: 1027 - DNA, 305 bp, Ctenocephalides felis
  misc_feature (302)..(302): n = unknown
ggaatattaatgcattatcgtttcggtgctaatatattcttatatatgtattaaatttgccccgttttcttaatctgacaataagagataataatgtcaacaaaaacatgcgattttaatcttgacataaaaagtgctaaggtaatgtaaataaaccgtaggcagctgattataagacaacttttatataattactaaacaatttttatggcataaattaatttaattaattaaaaaatataattaataaaattgataccattctaatcaatataaaattatcattttatttattcaaatcnaag

SEQ ID NO: 1028 - DNA, 127 bp, Ctenocephalides felis
aaaggcactttttgtcttcaagcacacacgaggctttaaactaccaatgtaatatttgactagaataattttaattgtttcagcgtccactgaaggctttaagcaacttcgtgccaaacagactctc

SEQ ID NO: 1029 - DNA, 498 bp, Ctenocephalides felis
aaaattccaaattttagtttataaatcatcttatatggaaactgtctgcaacaaaccagattttaaaatagaatccaataaatacggatataaaattttattaaaatacacaaacataacaaatgtcgttaattactaattcaaagtttcatacgatatgtcatatgctaattttagatttattatcataaataaatttattatttaaatcatattagaggaaaaaaaaatattttctcaattctctccttcaaaacttctttgcacttctccggctccatacagttttaataccacttttttcacaaaattcaacatttttgtaaaatccattgtgaaaattcatttggctgtttattaaaagacatcatcccttcggaatctgttatataccccaaaccagcactcttcaaatacacaaaatcctttttcaagttaacctcgaacgttacccatatttggaagttccttttggattcaacattgaatttgttttcg

SEQ ID NO: 1030 - DNA, 454 bp, Ctenocephalides felis
  misc_feature (8)..(8): n = unknown
  misc_feature (340)..(340): n = unknown
  misc_feature (401)..(401): n = unknown
  misc_feature (432)..(432): n = unknown
  misc_feature (434)..(434): n = unknown
  misc_feature (436)..(438): n = unknown
  misc_feature (440)..(440): n = unknown
  misc_feature (442)..(442): n = unknown
acaagtantaattgtttatacaatatgatacatagttgaaaatagcatgaaatatcattataattttgaaaggataaattctgttgacatttttctttttttttaatatttttcatatatatttgatttttgctgaacattataaaattcatgaattatagggaaatagaatttgtaaatttaaccaaacttaccaataagtcaacattatatgataaggaaatagtaaatatgacttcttaaaatatcagttattaaaatttggagcaatatgcattatcaataaatttactggaatttttatgcctgaaatcaaaatgccagaataggctgtgaatgntttaaatactttttgatagttggatatggaatagctgatttgtgaatgattctactgatgnatatttactaatactaatataaaacacgaananannngnanaaaaaaagcttg

SEQ ID NO: 1031 - DNA, 154 bp, Ctenocephalides felis
tgatagatgtattgcaataagttatttttttatgaaagataatgttcaacactaattgaaatagattataagattttcactacattttcatcccattttttctacatcatgaaattctgtattgtatgtaattcattatttttaagttaaatgt

SEQ ID NO: 1032 - DNA, 285 bp, Ctenocephalides felis
atatttatattattatgatatatattgttaaattataacaatatgattatttacatacatattttattatttatcttctaggaactctttatccatattattgaatttttctactaaatctgaaggtatttctagagattttaggtcatctgtcccaatttcttcctcagttcttattagaatgtcgacaacattctcacaagcaagcaaactggccttgtcaccaagttttaatgaaacttgttttgtttcccatttgtggtattctcttaatatttcataagt

SEQ ID NO: 1033 - DNA, 498 bp, Ctenocephalides felis
atcgaaaacaaattcaatgttgaatccaaaaggaacttccaaatatgggtaacgttcgaggttaacttgaaaaaggattttgtgtatttgaagagtgctggtttggggtatataacagattccgaagggatgatgtcttttaataaacagccaaatgaattttcacaatggattttacaaaaatgttgaattttgtgaaaaaagtggtattaaaactgtatggagccggagaagtgcaaagaagttttgaaggagagaattgagaaaatatttttttttcctctaatatgatttaaataataaatttatttatgataataaatctaaaattagcatatgacatatcgtatgaaactttgaattagtaattaacgacatttgttatgtttgtgtattttaataaaattttatatccgtatttattggattctattttaaaatctggtttgttgcagacagtttccatataagatgatttataaactaaaatttggaatt

SEQ ID NO: 1034 - DNA, 88 bp, Ctenocephalides felis
  misc_feature (80)..(80): n = unknown
acaggatacaagtgttctgtctgcccataataaaaaacgacataaacgtagtaaatacgataagtaatatgggcatcatntatcagcg

SEQ ID NO: 1035 - DNA, 394 bp, Ctenocephalides felis
  misc_feature (78)..(78): n = unknown
ttagcccaagtttcacagcaggtttggcagtcactataatagtatgctccctttcattttcccctgaaccaactttgnatgtgtaagagccagcatcatcttgttcagttttttcaataatgaattgatgttcttcctttattaattgataacggtccttgagatcattgatttcttctacttttttctcatctttaaaccactgatcaacaggaccatctttcaatggacaggttagaaccaatggactgcgaatatcaaaaagtttttgcgacgtggcttcaccttctcgggcataaacactgctttgggccaataataataaaattgcactacacaaaaactgcttcatatttattgaattttcttcccctcgattgaaaaagttcataag

SEQ ID NO: 1036 - DNA, 498 bp, Ctenocephalides felis
  misc_feature (353)..(353): n = unknown
  misc_feature (451)..(452): n = unknown
taggaaaaattatacttgataacacttcaaattcactcaaaaatataaaagattttatttaacgatgttactctggtgaacgaggctttttttgaaataatatacatacactaagtatcgagaactgttgcataaaactcaaaataattactgaagcattaaaaaattttgtcgccttcaaaatagaccttattcgaagtaatgaaaacatgccaacaattaatccaatcttcaaagcatcttttaaacgcctttataaggatattcttcagctcctttggcgtttttttcttacaaacattgttagtggaatctatcgatccaaagaggtatctaacaatagtattacttgnaattctatacttaagtatccatgacaataaataatttacagagggatagatctagtgaatacgttggttgcccatgatatttcatgagtttatggccnnaaaagcgttcacaatataggcgttgtgtgaagagagtcaacaatga

SEQ ID NO: 1037 - DNA, 415 bp, Ctenocephalides felis
  misc_feature (70)..(71): n = unknown
ccacatgaaattttaaatggaaagtatgaaatcagtcgcattcaagtatttaacaacatgctatgatagnnttattaaaacaaccaaatttaccatgtagcaagtcttcgcaaatcatcacattttttttcaacaatggattttcagtgacacttagaacaagtggaacagaaccaaagttaaaatattatagtgaaatgtgtgcaaaaccagagatgaaggatctagtcacactgaagcaaactgttaaagaaatgatagaagctgtttgtcaagaatttcttcaacctgaggagaatagattaatatcaagagaaaaatagatcttaattaaatagactttaaataattagcacaatttatttttagctgaagagatttcagttttcacttagctgaaataaaacaactattg

SEQ ID NO: 1038 - DNA, 109 bp, Ctenocephalides felis
aagctggcttgccaccgtttggtcctccaccatttgaagcaaatgttggaaatagaacagtaacattcgttgaaatgtgcagcgacctaggatctgccatcatagttgt

SEQ ID NO: 1039 - DNA, 440 bp, Ctenocephalides felis
  misc_feature (4)..(4): n = unknown
  misc_feature (21)..(21): n = unknown
  misc_feature (32)..(32): n = unknown
  misc_feature (34)..(34): n = unknown
  misc_feature (36)..(36): n = unknown
  misc_feature (54)..(54): n = unknown
  misc_feature (56)..(56): n = unknown
  misc_feature (61)..(61): n = unknown
  misc_feature (63)..(63): n = unknown
  misc_feature (65)..(65): n = unknown
  misc_feature (69)..(69): n = unknown
  misc_feature (77)..(77): n = unknown
  misc_feature (111)..(111): n = unknown
  misc_feature (114)..(114): n = unknown
  misc_feature (145)..(145): n = unknown
  misc_feature (149)..(149): n = unknown
  misc_feature (154)..(154): n = unknown
  misc_feature (157)..(157): n = unknown
  misc_feature (203)..(203): n = unknown
  misc_feature (438)..(438): n = unknown
gggnaagtagcgtgtgttgcncttctgaaatnantnggaaaccctcggaacttntnggggnantngccnaggacatnctatgcaaaataaattagtaaaacaatataattnaantatttgcaatctttgctgtgtataaaactangggnttatnggntgaaactgatttaaattcatttttgaactttgttcttatatgttgntcgtcattagctaggaatgttcctacatatactttaacattcacctaaatatatatatatgtaatcttatatgtatataaagtttttgatctgtgttggcgaggtaatattggcttgataaacagtgtttttaacatgatgaatgttcaattgttaaatcttgtgaaaatgtaaatttgcaatttcagctgtgaatgttttctggctgcctagcatgtgtattgcatcatatggngt

SEQ ID NO: 1040 - DNA, 500 bp, Ctenocephalides felis
  misc_feature (75)..(75): n = unknown
  misc_feature (203)..(203): n = unknown
  misc_feature (393)..(393): n = unknown
  misc_feature (424)..(424): n = unknown
  misc_feature (426)..(426): n = unknown
  misc_feature (481)..(481): n = unknown
  misc_feature (484)..(484): n = unknown
ttttttttttttttttttttttttttttataaacaatttttatttgtcaaaaagctacataagctagaaccattngaccacaaataatatatcactagacatttttaggaagtttacagtttgttatacaattcttaaactaatttagttatcagtaagttttaagcagtcggcacagtctttacggacttgtactaagttgnccctaaattctttcaaggctccccttgcgcattttccgacttcacggactaagttgcccaattgggaccaggtttctttgagtgccttggccaagtcttttgctccttcgtgggcagcttggagaacccctttcaagcaaactctggcttcatcgacatcggctgcggcacaacgcactccttggcttgngctctgagggcttcggcgtctccctggcttntnttcagcggccaaccattttggcgaacttgggtgaattcatcacgtttggcatctntgnaaccttgaccttacac

SEQ ID NO: 1041 - DNA, 498 bp, Ctenocephalides felis
  misc_feature (59)..(60): n = unknown
attagatatggtctgaccatgattgatatattttgatacattttaggcttataatatannaaaatacagtcaatttaacatttgatattacatatattaaatcaacaatatctaaacattgaaattagagaaactgaacctgaagatagtgatttaagtataaattctaagctagtaaagaagatccgaaaaaatctgataatggtaattttaccgctccaactaaatatccaaaattccagcagaatttgtaatgtaaatattgattctgataaactgaaatcaccagtaaaaaaaatccaagaagttctaataatggtaattttaccactaaggaatataaatgctgctgcaagagaagatttgactaatttcaaacagaataccccatcgaaataagcgatcagcaattgaagaagataattgtgctaattggtgatggtcttaattttatgatcgtttatatatggtaataataagtcttataagcttttgatt

SEQ ID NO: 1042 - DNA, 498 bp, Ctenocephalides felis
  misc_feature (69)..(69): n = unknown
gattgctttgaaaaaagttcagaatttccaaaatatgtcaaaataaaaaaacatttttttttcaaaagnggtattttcttgtcaaaatagtttctcaaaaatgttaatcgtttttttaaaaaataataatttttattacgggaagttccagcaatttgccttaagacacgatgccatgcgcccactagttataaaattgattttagataatgactttcaatacgtcgcaggaacatttagatgcggaatgcgttgcagtggttaaatcatccatataatttgtattagctacctaattgacttataccccaaatacctccacattttcagttatttttaactttctgtagggtaaattatagtaattgtccaaaaatcgaaaataaaaatggttgcatatcttcacgctttggcataccttagaaagaatggatttatgtgtgtgtatgtagtatgtatgtatgtatagagacaatttttccccgacgttttcgggag

SEQ ID NO: 1043 - DNA, 498 bp, Ctenocephalides felis
aacattgttgtaaataatatgttctcgatccaatatacaatactgtagtaaataatatgtgctcgaatttaaagaaatgtccgggctcgtgtaaactacatatatgatgaataatataatcatcaaatactattgggtataaacaatatgcattgaatggtccagagtataaataataactactttacgcccccgggtgggctcgaaccactaacctttcggttaacagccgaaagtgctagccaattgcgccacgggggctcttatcgcttcttgataatagtaacacatctcaataaacacattttacacatgatttgccattttagtaaataataggcactcgattttatagaaatgtcagggctcgtcccgggatttgaacccgaaacctccgcacccaaagcgggaatcatacccctagaccaacgaaacacatgttctatccagtgcgtgttggggtgcatccaatgtcaacattgtagtaataatatggcc

SEQ ID NO: 1044 - DNA, 437 bp, Ctenocephalides felis
gattttcaatacaaagtggaagatccgccaattcaactttcatttggtgccaatgaagcaggagatgcatcaggaaaggtgaccggcagctactacgttttactccccgatggaagagtgatgactgtcgactacgttgtagatggcgaaagcggttttcaaccgaaaatttctttcaacaaatagatcaagctgacaaaggaatcgaatcacgtaaacttcattaacaacatcatttcatagctaaaaatttaaacaacgaaacatatatactcatgaattactgcctatattattgtttatactgcctaataaacaatttgtgattaatactaattaatttactactgctaaacagaagaaatatatgacgaagctgtgaaacgcaataaagttttgtaaatattttgcagattcatttaaactaacaattatgt

SEQ ID NO: 1045 - DNA, 498 bp, Ctenocephalides felis
  misc_feature (96)..(96): n = unknown
  misc_feature (137)..(137): n = unknown
  misc_feature (154)..(154): n = unknown
  misc_feature (157)..(157): n = unknown
  misc_feature (169)..(169): n = unknown
  misc_feature (179)..(179): n = unknown
  misc_feature (200)..(200): n = unknown
  misc_feature (234)..(234): n = unknown
  misc_feature (266)..(266): n = unknown
  misc_feature (279)..(279): n = unknown
  misc_feature (317)..(317): n = unknown
  misc_feature (319)..(319): n = unknown
  misc_feature (349)..(349): n = unknown
  misc_feature (399)..(399): n = unknown
  misc_feature (416)..(416): n = unknown
  misc_feature (431)..(431): n = unknown
  misc_feature (474)..(474): n = unknown
  misc_feature (478)..(478): n = unknown
taattaattttaaaaaattaaggatagaaaccaacctggcttaaaccggtttgaactcaggatcatgtacgcaattaatggtcgaacagaccaaantttaaaacttctgcattttaaaattatcttaatccaacatngaggtcgcaatctattntgncgatatgttctnttaaaaatanttacgctgttatcccttaagnaacttaatcttttaatcataatttatggatcaantattcaattatttatgttttaataaaaaaaangttttataaattntcctatcaccccaataaaatgtattaatataaataaantntaataatattcttaaaattaatctatattnatatataaaactttataagggtcttctcgcctttaataatatttacgctntttaacataaaaattanattctataacaattntattaagacagttaatatttcattcaatcattcattccagctntcanttaaaaaactattgatatgc

SEQ ID NO: 1046 - DNA, 582 bp, Ctenocephalides felis
  misc_feature (15)..(15): n = unknown
  misc_feature (34)..(34): n = unknown
  misc_feature (47)..(47): n = unknown
  misc_feature (210)..(210): n = unknown
  misc_feature (263)..(263): n = unknown
  misc_feature (371)..(371): n = unknown
  misc_feature (441)..(441): n = unknown
  misc_feature (516)..(516): n = unknown
  misc_feature (550)..(550): n = unknown
  misc_feature (574)..(574): n = unknown
cctacacaactcganatactcataaattattaanttctaatcgattncctgaaaaagggcgttgggattggtgaaagtgcatttattcgttacatttctgataacttaaaaactatttgcggaaaactaaaaatatgtttggagaaaatatagaaaattgaatagtctaaaacattttcctaacataggaagaccctacagcaactcggnatactcaaaaaagtttgttgaaaagttgataaatattcacagcgcttcactgntttgttcttgagtttaggaaaagtgcatttatttataacttttgaacgggttatttgattggaatgaaatattcggcaaatttatagaaaattaaataatctacaaanttttcttttaccgcaacagaaaccaacgaaatattcccttcggctaatacgggtaaacatcacaaaatgnatcgaatcaatatttttttaaaattgaaaattgcaaatgataaatggaattggatttatatttttttctaaaaangaatggggaactattccaaggaatgggagaatgnaagaaaaataatattattcgatgngaaaatgg

SEQ ID NO: 1047 - DNA, 472 bp, Ctenocephalides felis
  misc_feature (6)..(6): n = unknown
cccggnttgggtgatcaacaccaaagacacgctcagaattggcgttccattaggtaattccaggttcacgagagtcaaatcatcaaaggggtagcgttctttaaagcgtttatccaaagagtcccaagtattatccaattcctcatccacaaccaaaggatatgtattcttcgaatccaaactaagtttatcagtgccttctacaactacagtgactacagctttaggtaattgaaaaggattcaatttactcactccgtcccattcagcagaactctgctccgatgtcaatcctaaggctacggaatacaattcctttaacaaagattggggtaaaggagtctcgccttggaattggactccatttggagaatttaatacactcagttcgccgttgcaatatatggatgccacaaggggcagtaaataaattagaaccttttgcacattttattacttacggataaaacgt

SEQ ID NO: 1048 - DNA, 221 bp, Ctenocephalides felis
  misc_feature (57)..(57): n = unknown
aagcagaagatgagattaatctgcggaggttgttgacaaattaccagaagatctggncggaaaattgaacatttcagcacttccttcgacagaggaagcagaaaaactggccagagaaaaatgcagaaaggaaagtggaagcgacgatgcttacgataaagcttttgccgccaaagatgagctgaagacttgtttcacgtctttgctgaatatggaggaac

SEQ ID NO: 1049 - DNA, 427 bp, Ctenocephalides felis
  misc_feature (74)..(74): n = unknown
ccaataattacatttaattgaaagtgtcattaaaatattgaccatgcattatacaaattatatttataattatngcgttaacaaaataaaataattttgtgctaaagcctctgcaataaaaagaactgactcatatgtataaagatttaattgtataaatgcaatacaaattaattacagttaaaatttaagaacatattgcatgacagtttgttataaagcataaatgactgcttagtttttttttttaatgaaagtttaagacatctattataggaagatatatggcggaaacagaatcattacatatacatcaacatcaatgtgcattacttttttttttaatttctcttcagatagaatacgatgaatataaacataagtatgaattataaaattgtattgtatactgtataaaattaaatgt

SEQ ID NO: 1050 - DNA, 570 bp, Ctenocephalides felis
  misc_feature (570)..(570): n = unknown
aaatacaaggggttgtatgaaaccaactgatgactgtgatgatatgaaatgccaggagtgcaaaggtaacctttgtaatgtcgatgttttcccaagaaatcgcagggtttgcaacgctaaagatgatgccaaggaagtttgtctcaagccacaagatacttgtttgagtattttaaatgcacaaggtgatgccataaaattagggtgcaccagcaacctgttcaagaaccagaatctgaaaaaaatgtgcgagaaaaaaccagaacgttgcccaacttgtgacaaaaacgaatgcaatggtgatgccaaaaaacacgaatgtgtttcttgtgatgaaaatgatgaaaattgccttgacgaccctgaaaaagtcgagacgaagaccaaatgcatgggcaaatgctacttagatattgacggagataaagtgaagagaggctgcaccgacacctacaaatgcgataaggaaacttgtctggaatgcgaggaagagatttgcacgagcgaaatgtgctatgcgtaaattgtttaaataatttttgcaagttttaaataaaatttatcaacttn

SEQ ID NO: 1051 - DNA, 386 bp, Ctenocephalides felis
  misc_feature (8)..(8): n = unknown
  misc_feature (12)..(13): n = unknown
  misc_feature (16)..(16): n = unknown
  misc_feature (20)..(21): n = unknown
  misc_feature (33)..(33): n = unknown
  misc_feature (36)..(36): n = unknown
  misc_feature (52)..(52): n = unknown
  misc_feature (62)..(62): n = unknown
  misc_feature (110)..(110): n = unknown
  misc_feature (129)..(129): n = unknown
  misc_feature (133)..(133): n = unknown
  misc_feature (304)..(304): n = unknown
atagatgnacannctnactnncgaaaaccccgncgncggggcagaggcgcgntcaagcatanggtctttggtatttcgttatggcggcgaaaatatatcgataatatatngggattggggtataggaantganttaatattttattggaaacaaaagtttaaaatagttttgcttaactattatttattaaataattattatgcatcattttaaaatcagtcatcattcatcataaatatcgatattcgtatttcaatatatcgcacacctcaattaatttatgtatcaattatattgattganttatttgcgaatttctcagttatgaaaatgcagcaatgcctgtgatagctcttcctagaataagtgcgtggatatcatgtgt

SEQ ID NO: 1052 - DNA, 537 bp, Ctenocephalides felis
  misc_feature (308)..(308): n = unknown
cctctctcagggtaaagtgatatgagctgatttggtttcatttatgcaaatcttccatttggcaagccacatttgtagtttattgatatgttcttgcgtttgtcgggaagcttgatcagcactgtgattatttttaaaggtttaacttatcgaaatacggaaaagtcaaaattcgattttctgaaaatttcacactaggtgggcttcttaatataaggttgtagtgaccgaggtcgctaacgcgcggacctatgtggatggtgtcaagttggacggacctgtccaagggcagtagtgctacacattgnatatatgtattattttgtattaattttattcaattacaatttaaaacaagctgtttgaaatgaaacctttgcttccatattgtttactccagaatctaaaattatgaataaatgaatattctagtgaattatttgtaaaagttcttcttcaacttagtatctaaaatacaacaaacaaactgcgcataaatcgagaatattattagacatcatgcagagtccctgccgg

SEQ ID NO: 1053 - DNA, 331 bp, Ctenocephalides felis
ggtctgaaacactttcaaacaaactcagaattatcgatgatattttggaaatgcaaaaaatggctgatgagctaatattattggcacctcttaaatcagtcgtaaccattgaaacacttcgcaaaatgtcaaaaaaaggattgacttatgagatacttaaaaaagcttacgaaggaaagggagaagagggccttgaacaaattttgaaaactaaagtaacaaaggcaaagcttactataaacaatgttgtggtgttttttcaaaaacatgcaaatgatgtttaatgacccttatttatcagaaatatattataaatatttaacattttagt

SEQ ID NO: 1054 - DNA, 344 bp, Ctenocephalides felis
  misc_feature (4)..(4): n = unknown
  misc_feature (42)..(42): n = unknown
  misc_feature (68)..(68): n = unknown
  misc_feature (95)..(95): n = unknown
  misc_feature (150)..(150): n = unknown
  misc_feature (155)..(155): n = unknown
  misc_feature (187)..(187): n = unknown
  misc_feature (195)..(195): n = unknown
  misc_feature (230)..(230): n = unknown
  misc_feature (312)..(312): n = unknown
cagngattcatttcatattggtatacatatttctcaatatgncatttttctaaactttgtgggacagnaatataccaagttccttccgtaattgntcatctccaatatttccattatgaggaatgcttctaagcatttttaaataactgnctggnaatccagattctaacgctccttgaataattgnctcaaganatatcaaactaggcttcctatcttctggaaaaggntcacccggttgcaacggagcaggcagtttactttgctcatatattcggcacgatacattttcgccactcttagttttgatgnttacatctttagcaaagtatgtgtttaaatgt

SEQ ID NO: 1055 - DNA, 264 bp, Ctenocephalides felis
cccatattgaacatttatttttagcgactacattagaaatgtaatagataaaaatgttataaatctgcgaatataaaatattgtattttcataaagaatattattattctttcttattttttgttcatagcagaatatttttttcgccccaaaaagccgacataatacaccactaaagacttgtcgaaagttgtggcgtccgggactcgcaaattcaatttgtgcacaatcgcgcggtgaaatgcacaatttccatttctatgt

SEQ ID NO: 1056 - DNA, 647 bp, Ctenocephalides felis
  misc_feature (20)..(20): n = unknown
  misc_feature (67)..(67): n = unknown
  misc_feature (74)..(74): n = unknown
  misc_feature (143)..(143): n = unknown
  misc_feature (371)..(371): n = unknown
  misc_feature (403)..(403): n = unknown
  misc_feature (516)..(516): n = unknown
  misc_feature (530)..(530): n = unknown
  misc_feature (544)..(544): n = unknown
  misc_feature (567)..(567): n = unknown
  misc_feature (570)..(570): n = unknown
  misc_feature (628)..(628): n = unknown
  misc_feature (642)..(642): n = unknown
tatacatatttcagtgaganatcagcaatagtttatgattttattgacgttgtgaacggacatgtgntctgggngtttataaatttgcgtatagaaacaataataaattacagtacataatactgatttgattttactaccgnaacgatttgcttcagatatttccagaaaaatgttagttttcatacattttatttaatttaatatctccgacttgttattactaagcgaaattttctctcttttaaatatagaattctttatagtattcataatagtgaagctttaaagtatttctctcactatcacccttttttatacaaacgcattttgagaagtaacgtgaaagcttactttcgaattggtgatgnttctatgaatacttatatgtattataatatgnattaaattgaatttttgcgtttcaatagaacttcaatcataaatttgaattggggttaatattggtgggggttggattattaaaagacttcgatatgaaaaaaatcaatgggncatcaaatcctagnaggatattttatgnggatacctagcacccgcaatggnggnaaatggcaaaaactggtatgaccccgatttttgacgaatttttggtgggcgatggtgnaaactaaaaatttntcgct

SEQ ID NO: 1057 - DNA, 499 bp, Ctenocephalides felis
  misc_feature (12)..(12): n = unknown
  misc_feature (19)..(19): n = unknown
  misc_feature (22)..(22): n = unknown
  misc_feature (57)..(57): n = unknown
  misc_feature (65)..(67): n = unknown
  misc_feature (88)..(88): n = unknown
  misc_feature (133)..(133): n = unknown
  misc_feature (143)..(143): n = unknown
  misc_feature (147)..(147): n = unknown
  misc_feature (153)..(153): n = unknown
  misc_feature (160)..(160): n = unknown
  misc_feature (192)..(192): n = unknown
  misc_feature (231)..(231): n = unknown
  misc_feature (255)..(255): n = unknown
  misc_feature (258)..(258): n = unknown
  misc_feature (271)..(271): n = unknown
  misc_feature (279)..(279): n = unknown
  misc_feature (290)..(290): n = unknown
  misc_feature (319)..(319): n = unknown
  misc_feature (334)..(335): n = unknown
  misc_feature (351)..(351): n = unknown
  misc_feature (364)..(364): n = unknown
  misc_feature (375)..(376): n = unknown
  misc_feature (382)..(382): n = unknown
  misc_feature (407)..(407): n = unknown
  misc_feature (442)..(442): n = unknown
  misc_feature (444)..(444): n = unknown
  misc_feature (451)..(451): n = unknown
  misc_feature (469)..(469): n = unknown
  misc_feature (481)..(481): n = unknown
  misc_feature (497)..(497): n = unknown
ctcaatgaaatncctattntgntctttttctgctttacaggatttaatgcaaactgngggcatannnaattggaataactcaaatcangttaaatgatctatttcagataaattattacagtatcttttcatnctaaaaattntatnccgctntacgcanttttaaaacggtctctgattattttaatcatnatttgtaataattaatttaatgcttatgcaagcattctnataatactgtaatttaaatattgnaanaattaaatgtttntaggtttnggactagtgtntataacagataaattaatatattattgtnggattgtatttaatnntttaaagaatattaanatcagtgtttggnttatatagttnngcaatnctgtctaaagtacctggttattttnatttattttaggatcattatgaagcaattgcaaananttatttncaaatttaaatttatatnttttttgaccangtgccaatttacttgncc

SEQ ID NO: 1058 - DNA, 310 bp, Ctenocephalides felis
  misc_feature (53)..(53): n = unknown
  misc_feature (92)..(92): n = unknown
  misc_feature (211)..(211): n = unknown
  misc_feature (226)..(226): n = unknown
  misc_feature (307)..(307): n = unknown
ttttttttttttttttttttttttttttttttaatgatttaattaatttattntaagccaataattgatattaattatgcattaatcattgnatttatactttcctagaaaactatacatcacatgttgaaacaaattaaggttcatggcttctcgcctttccttagcgcttgttttaaatttgatccattctttccgaatcttgttactntttggtccccatttntcattgggagtgaacacgtttttcaatgtatcattaatggaatgttttctatttttcaaatatatccaaattgcccaaagnggt

SEQ ID NO: 1059 - DNA, 215 bp, Ctenocephalides felis; identical to SEQ ID NO: 517
  misc_feature (34)..(34): n = unknown

SEQ ID NO: 1060 - DNA, 275 bp, Ctenocephalides felis; identical to SEQ ID NO: 518

SEQ ID NO: 1061 - DNA, 330 bp, Ctenocephalides felis
  misc_feature (1)..(3): n = unknown
  misc_feature (13)..(13): n = unknown
  misc_feature (22)..(22): n = unknown
  misc_feature (27)..(27): n = unknown
  misc_feature (30)..(30): n = unknown
  misc_feature (57)..(57): n = unknown
  misc_feature (91)..(92): n = unknown
  misc_feature (130)..(130): n = unknown
nnnaagccctttngaaaccctnggaangantctggcgccctttcccgtacatatccnagttaatatatattatagcttctaaaataattcnntcacgatgtttattttgtctcaacggtcaaaataaatnctgatttttttttttaaatgtaaaagatcaataatcaatgaagcaaagattttataaacatttttgctaaatttttatgtaattgaattatttttcatgctatatataatttatattggtagttaattattagagattttctaaaaaaaaatgatctaaaatttggaatagaacaaatttttcatggcggcctaaattgt

SEQ ID NO: 1062 - DNA, 126 bp, Ctenocephalides felis
tttactacttcagaattatttatttctagtaaacaacgaatttaaacttttagaatattcaaaattaattgcgacaagcaatattaccatgcactcttgaagattttaaaaaaaagtagttaaggt

SEQ ID NO: 1063 - DNA, 116 bp, Ctenocephalides felis
ccgtttgttatatattggcatacaaatgcattaagattaggctctgagacagtgattgaatgttatttttgttattttaaggaaatttaataaaataattattaaatcgaaaaaaa

SEQ ID NO: 1064 - DNA, 333 bp, Ctenocephalides felis
  misc_feature (31)..(31): n = unknown
  misc_feature (33)..(34): n = unknown
  misc_feature (40)..(40): n = unknown
  misc_feature (305)..(305): n = unknown
aattaaaattttctaacattcacaaaattgntnntcaaantccgaacgatattttcaaacaataataaattaacaacggacttagcaattataaatattacagctcactactacaaattacatatttttatcaatcatatatatatatatatagttttggtttaagatatataacaacaatgtttctatcgcacatatcattaaatatactttcatatgcgacaagacaagttttgcattaaaaaaatatatgttactaatgacaatatttagaatcacacttgaagactcctcctcggagcctncggggggcgccgagtaaaacaacaatgt

SEQ ID NO: 1065 - DNA, 498 bp, Ctenocephalides felis
  misc_feature (21)..(21): n = unknown
  misc_feature (446)..(446): n = unknown
  misc_feature (470)..(470): n = unknown
  misc_feature (494)..(494): n = unknown
agtagagaattgacagcagcnattgctgcggaaaccgcactcactgaacttcagcagcaaggaaatgatgttctcatggttccatttataacaaaatgtcagctgccattggaaagttttcgattgttaaaaaccagcaaagccatagtcaataaaagaagtttgaaatatcagatttttctgttcgagaatttaatactgtttactgaacctactattgtgaacaatgaagagttttttacctgcaaagactatatatctggatagaattttaccacctgtcgaatgtcagaagtctttatatgcatttaccctgacgagttcagaaaataaatctagaattttccatataaaatgctcaagtggcgatgaaaggatcgtccctggatgactattattaggaatattttgtttcagcaacaacaggcatgggaaaggaagccatngaaaaataaattagctttattctnccgacaggagggcttccacccaanaacc

SEQ ID NO: 1066 - DNA, 264 bp, Ctenocephalides felis
aaccacgagcattcctattgttaatgtcgtgactgacgtagcatcgatcttcgtttatcttgcagactgccactttagctgccaattccgcagcagtgttgcttgtgcaggtgtcatcattttcgttgcattttacacatttcaggggatcatttttattacataggttactattgcactttagacaagacccagatgttgcattttcgcattcttttctaatcgaatcagcttcaggtaaatcgaccaaacaacctttttttg

SEQ ID NO: 1067 - DNA, 498 bp, Ctenocephalides felis
  misc_feature (207)..(207): n = unknown
  misc_feature (209)..(209): n = unknown
  misc_feature (294)..(294): n = unknown
  misc_feature (379)..(379): n = unknown
  misc_feature (414)..(414): n = unknown
  misc_feature (428)..(428): n = unknown
  misc_feature (431)..(431): n = unknown
  misc_feature (463)..(464): n = unknown
  misc_feature (470)..(470): n = unknown
  misc_feature (481)..(481): n = unknown
tgtgactcatttggagttcttgaaggtggttcttctacccaagctttattagatccctgcatgctcatgttcaagctatgaccaggtggaggatgttcaattatgtcgaattgagagttacattgcgcactccttacacctagtgagttcagaactgttatattctcagctcctgattttgtgaaaagcatatattcttctaaaggntncatagtatgattgttgacttcaatatatatatttgagaggcatcctgaatagctttttgaatgtagcaaatctgggatcatctgncgataaaccaccgatttgtatttcattgattccttcttaggagattttacaaaattgacttcgggtaatatttctaaagatcttnaagttctgtctattaacaatatgggagcctgttgngatacccttttggnatnagacgggaatgcttagcaccgttttagaaaanntttctngttaacttttngcttccaaacacaagac

SEQ ID NO: 1068 - DNA, 422 bp, Ctenocephalides felis
  misc_feature (378)..(378): n = unknown
taacctctaatgacgtcttaacacgtaagacaaggcaagcagatgatgctccaaaagaacccgatttcaacctagctaaagaatacaacgactcctacccggtggtttttaacatcattttatggttcggagtagcctttttcttctcgttacttgctatctgtatctcgatctccacaatggaccctggcagggactccattatttacagaatgacatccacacgcatcaagaaggagaattaaagtttgcgaaaggagtgtttttaattgtaaatagattgtttagtattattacaatgtaaccgagttattaatttgtgatcaatataaattaaaaattaaaatacaatatctttgttgaaaatcgaattattgntctattatattttttgttttacattcctagtattaccgaattgt

SEQ ID NO: 1069 - DNA, 288 bp, Ctenocephalides felis
  misc_feature (263)..(264): n = unknown
  misc_feature (266)..(267): n = unknown
  misc_feature (276)..(276): n = unknown
  misc_feature (280)..(280): n = unknown
catagaaatataatggaattttacttttaacattgtttataaactatactttacaaattaattgtaatatataaatataattatattatttcataaaatatttgttctctgactagtgtagatgttttcgtgctttctaaataagggaagttatataggcctgtatgcctttctgtgaacaactctatgtatgttctaattttgttaggatttatttttataaaaatgaatatataaatatataaccgcattaaaaaaaaaannannaaaaaaaanaaanaaaaaaaa

SEQ ID NO: 1070 - DNA, 498 bp, Ctenocephalides felis
  misc_feature (323)..(323): n = unknown
  misc_feature (388)..(388): n = unknown
  misc_feature (390)..(390): n = unknown
  misc_feature (448)..(448): n = unknown
  misc_feature (461)..(462): n = unknown
  misc_feature (477)..(477): n = unknown
  misc_feature (484)..(484): n = unknown
  misc_feature (488)..(488): n = unknown
aatttacaatcagaatcaatcttacaattagtgtagttgtctatgagagaaaacatcgggcgttggtcacaaaatgattaacagttatagaatgccatgtgtttaatacgcagtttacaatataatgttactattgttagttggcatactgtaccgagttttattttttttatgaaaaagaagatagagtggccaaattattttggtcatgtgatatttgttccattaaagattatatgagggcatgtgcattggtaggtgcatgatttaatatttttgtaccgttgcggaattgatttgtggtggagatactgtattaaagngtttcaaatagttttgaaactgctcttgtgtgaaatttagtatagtccccaattcaatctaagangncttgggtcttccctttatggtgtcagcacttggataaactttattctaccttatccanttattttagttannatgctccgccccttnggccagnatantttgaaccga

SEQ ID NO: 1071 - DNA, 269 bp, Ctenocephalides felis
  misc_feature (15)..(15): n = unknown
  misc_feature (32)..(32): n = unknown
  misc_feature (36)..(37): n = unknown
  misc_feature (44)..(44): n = unknown
  misc_feature (51)..(51): n = unknown
  misc_feature (53)..(53): n = unknown
  misc_feature (57)..(57): n = unknown
  misc_feature (60)..(60): n = unknown
  misc_feature (65)..(65): n = unknown
  misc_feature (83)..(83): n = unknown
  misc_feature (133)..(133): n = unknown
  misc_feature (205)..(205): n = unknown
  misc_feature (212)..(212): n = unknown
  misc_feature (241)..(241): n = unknown
  misc_feature (252)..(252): n = unknown
  misc_feature (267)..(267): n = unknown
caggattactaatgnccgcgtttccactgttncagnnattccgnaaaccancnaccncgnatatnaatatgaagctattggtnaatggtcaataaatgcacaaattatttcacaaatcccgcatgagaccatnacgaatacaagaattggaagctttcccacagaggtaataatagcacctattatgggaaatcaatcgcatatncagcttncaacattaaaagaatgcataaatgcctgntctttcattgngtctttacactcggncg

SEQ ID NO: 1072 - DNA, 498 bp, Ctenocephalides felis
  misc_feature (56)..(56): n = unknown
  misc_feature (376)..(376): n = unknown
  misc_feature (400)..(400): n = unknown
  misc_feature (428)..(428): n = unknown
  misc_feature (473)..(473): n = unknown
aagatttaaacaatatgtaaaatatttatgtcttttaatttaaaatgaatttatangttttttactataactagttaatgaattatataaatattttaaatattgttaagcactggttaattttcgtataactgctatgcaaaatactgttagatttgaattaattttactgaatcaaatgaaaaaaagcaaagaaaaccagatacttcaagtaaactacacgtaaataaagaatgtttgcataatatgatattattatactcacaatgttcttttgtgcgaagtaattgacaagttttttgaatactaaacaggtatgtaaaataatatgtatataataattatatgcacatttcttaaataactgattagttgncaaaatcacacgaaatggtagctncccaatattttaaaagctacctaaatgnctaaatccctctggtcggaagctaagtagcatcaaaccatgtttncttatttacggtaaaattaacatta

SEQ ID NO: 1073 - DNA, 498 bp, Ctenocephalides felis
  misc_feature (5)..(5): n = unknown
  misc_feature (8)..(8): n = unknown
  misc_feature (20)..(20): n = unknown
  misc_feature (23)..(23): n = unknown
  misc_feature (33)..(33): n = unknown
  misc_feature (37)..(37): n = unknown
  misc_feature (49)..(49): n = unknown
  misc_feature (53)..(53): n = unknown
  misc_feature (70)..(70): n = unknown
  misc_feature (83)..(83): n = unknown
  misc_feature (143)..(143): n = unknown
  misc_feature (179)..(179): n = unknown
  misc_feature (209)..(209): n = unknown
  misc_feature (250)..(250): n = unknown
  misc_feature (267)..(267): n = unknown
  misc_feature (275)..(275): n = unknown
  misc_feature (297)..(297): n = unknown
  misc_feature (300)..(300): n = unknown
  misc_feature (338)..(338): n = unknown
  misc_feature (380)..(380): n = unknown
  misc_feature (403)..(403): n = unknown
  misc_feature (405)..(405): n = unknown
  misc_feature (411)..(411): n = unknown
  misc_feature (418)..(418): n = unknown
  misc_feature (435)..(435): n = unknown
  misc_feature (437)..(437): n = unknown
  misc_feature (458)..(458): n = unknown
  misc_feature (470)..(470): n = unknown
  misc_feature (476)..(476): n = unknown
  misc_feature (490)..(490): n = unknown
aatgnttncagatccagccnccnaagaagcggnttgnttgcttaaaccnatgngccaaatttgagatacnagctttgagcgantcagagttttcttggaaaatgttaatggtaaaatgaaaatatgaaaaatttcgcaattgngacaaagattttcctaacatagaaatattttgctgntttatgatagtaaattatttcataattagnaatttaattatattttaatattaattggttaataacatgcnaattaatcgagaattgntttaatgnttgatattttaacattaattgnggntgggcagatatttattaattatatgttaagttcgcgtntttgctttttatttaattaaaattaagattattatattcctnatcatgggttaaaaaaaccatgntntcattnaagggcnaagtaccccaagttttngnttaacaagggtttttaaggtntactgcagctangcctcngtattacatattcnacacttct

SEQ ID NO: 1074 - DNA, 437 bp, Ctenocephalides felis
  misc_feature (354)..(354): n = unknown
  misc_feature (372)..(372): n = unknown
  misc_feature (387)..(387): n = unknown
  misc_feature (392)..(392): n = unknown
  misc_feature (396)..(396): n = unknown
caagaaacaagcataagatggccatggcaatgctattttatgaggcagaattgccatgtgaagatttttttccccgaacattatacaagattttccacttagattttttttattacgatagttattaagtagtcggcatttctgttgtagtagtagtaagtagtagaaaaatatgaaaaaaatatttgcaatttattatcaaaaactctaatataagtcccagatttttttatctaattttgtttattgatcaataattattattattattattgttgttgttgttgacgatgaaatatgatttatatacaacaaatttatatttaaaatagatctttataacttactgactgnagattattggtaattggnctggtgaccaattcntggtncccntggttccattaaatgaaaaaaaaaaaaaaaaaaaaaaaaaa

SEQ ID NO: 1075 - DNA, 324 bp, Ctenocephalides felis
  misc_feature (13)..(13): n = unknown
  misc_feature (19)..(19): n = unknown
  misc_feature (22)..(22): n = unknown
  misc_feature (26)..(26): n = unknown
  misc_feature (32)..(33): n = unknown
  misc_feature (35)..(35): n = unknown
  misc_feature (43)..(43): n = unknown
  misc_feature (63)..(63): n = unknown
  misc_feature (67)..(67): n = unknown
  misc_feature (79)..(79): n = unknown
  misc_feature (81)..(81): n = unknown
  misc_feature (121)..(121): n = unknown
  misc_feature (136)..(136): n = unknown
  misc_feature (148)..(148): n = unknown
  misc_feature (152)..(152): n = unknown
  misc_feature (196)..(196): n = unknown
  misc_feature (206)..(206): n = unknown
  misc_feature (211)..(211): n = unknown
  misc_feature (217)..(217): n = unknown
  misc_feature (265)..(265): n = unknown
  misc_feature (323)..(323): n = unknown
ttttaaccctttntaaccnttngaantccccnngntttcggcnaaggcccacaccttgtgtangccngcttaaacttanancctttcattttaaatagacaagaagtgccattgggggganctattgattttgaanaaccaccattcnaaanctcttatggaggaggagatagttattcatattctgcaccacccnccccttcttntaaantgaganacaagtgctcctgcacatccagctgattatgaaccaacggagtatggngaatatgcttatcgtcgtggtatggattatgaagatacaggaagttccgctggaagtng

SEQ ID NO: 1076 - DNA, 497 bp, Ctenocephalides felis
  misc_feature (58)..(59): n = unknown
  misc_feature (406)..(406): n = unknown
  misc_feature (412)..(412): n = unknown
  misc_feature (414)..(414): n = unknown
gaaatatgataatatgttcaaaataaaaatgataaaaataaatgagtggattatcaanncaggatattaaacataatagaaattttttttgaaagttatggaaattttttaagaaaaggttaatgacaaagttgaattaattacctgtatgtttgaatatttgttagcacttttgcactaaacaagcttttttaacaaaaatgattttgtgagttaattttccgccgaataattagattttgtaaatacaaaattactaaaaaatttgtcttttttaaaattattatttgaaaacacgaataatattgttctctggatgttgttcgattggttttcgaaaattaactaaatgaaactggtgtgccctttgtacacgtgtaacacttgacgagagatgggagatggntggggngngtttttatatgtcaggggggaatacttaaattgtggatcttaaaaggaagtcgtattaattgtttgtcaaaaagtgaaaaaat

SEQ ID NO: 1077 - DNA, 354 bp, Ctenocephalides felis
  misc_feature (16)..(16): n = unknown
  misc_feature (36)..(36): n = unknown
  misc_feature (53)..(53): n = unknown
  misc_feature (59)..(59): n = unknown
  misc_feature (84)..(84): n = unknown
  misc_feature (115)..(115): n = unknown
  misc_feature (115)..(116): n = unknown
  misc_feature (119)..(119): n = unknown
  misc_feature (125)..(125): n = unknown
  misc_feature (141)..(141): n = unknown
ttttaaaccctttttnaacccttttaagttccgcgnaggtttccgcccgaggncccttnaattggtaaatatttataaactacntttttaattttgttcaaactaatttggatannggnttacgnttaaagctatatcaanttggataataaattattgtaagaatttactactcatttacacgataatatataaagcacaccataatataatattattttatctataatacaccatggctgttaaaaacaccaaatttatattctcaaatactaaccacatacaatcctgatttaaatttgtataatatacgtttcaactcaactaagtctatcacaagaaattggacgtagt

SEQ ID NO: 1078 - DNA, 387 bp, Ctenocephalides felis
  misc_feature (4)..(4): n = unknown
  misc_feature (12)..(12): n = unknown
  misc_feature (14)..(14): n = unknown
  misc_feature (16)..(16): n = unknown
  misc_feature (24)..(24): n = unknown
  misc_feature (30)..(30): n = unknown
  misc_feature (38)..(40): n = unknown
  misc_feature (48)..(48): n = unknown
  misc_feature (57)..(57): n = unknown
  misc_feature (64)..(65): n = unknown
  misc_feature (72)..(72): n = unknown
  misc_feature (83)..(83): n = unknown
  misc_feature (94)..(94): n = unknown
  misc_feature (109)..(109): n = unknown
  misc_feature (115)..(116): n = unknown
  misc_feature (118)..(118): n = unknown
  misc_feature (127)..(127): n = unknown
  misc_feature (130)..(130): n = unknown
  misc_feature (146)..(147): n = unknown
  misc_feature (161)..(161): n = unknown
  misc_feature (368)..(368): n = unknown
ttgntaaacccntntnaaccctcntggaantccccaannntttccccngcagccccnaataatnntacttcnagttaacctancacgattattnttataatttttttgntaattnnanggtctgggnctngatgtcacctcactgnncatatgaaacaaanatgtgacgctctttataaatttatcactaccttatctataatcatatcacctcacataaatttcataccatggttgtatttacaaaattcagacagtagttgcagagatgtattcgaaatttgaatcattaaacaaaaatattttgataaaattgatatgtctctccttaaaaaaaattgaatttctcatttataattatttcttgntctgggcatatgtaatagt

SEQ ID NO: 1079 - DNA, 467 bp, Ctenocephalides felis
  misc_feature (3)..(3): n = unknown
  misc_feature (21)..(21): n = unknown
  misc_feature (30)..(30): n = unknown
  misc_feature (36)..(36): n = unknown
  misc_feature (44)..(44): n = unknown
  misc_feature (47)..(47): n = unknown
  misc_feature (58)..(58): n = unknown
  misc_feature (73)..(73): n = unknown
  misc_feature (87)..(87): n = unknown
  misc_feature (97)..(98): n = unknown
  misc_feature (115)..(115): n = unknown
  misc_feature (125)..(125): n = unknown
  misc_feature (154)..(154): n = unknown
  misc_feature (159)..(159): n = unknown
  misc_feature (183)..(183): n = unknown
  misc_feature (206)..(206): n = unknown
  misc_feature (267)..(268): n = unknown
  misc_feature (362)..(362): n = unknown
  misc_feature (374)..(374): n = unknown
  misc_feature (381)..(381): n = unknown
  misc_feature (403)..(403): n = unknown
cgncaccaatgggttttcccnaaatttttnttcggnccggaccnggnggcaaaagtgnaaccgttttttccgnccgaggagaatggnaaaaattttnntcatggttttttgggtnaccaccaatnggcaataaaaccttttggttggcccaatnggctngccctttgttaaaccggggtgcgngcatccccccccccccgcgaagnatgcaaagtggagaatggttaagtagggcttaacccaggaaaccatcttgatagactaatnnggttcaattatcataagtagtcattatttataatccacaatgactggcattaatataaaaattgttaaaattaaatgttaaatgttttatgtangggccaacaaangcatacntgtattctggtattaaatttantttgagcttttgatctgttttttataaataacgttgccgcttgaaaaaaaaaaaaaaaaaaaaa

SEQ ID NO: 1080 - DNA, 489 bp, Ctenocephalides felis
  misc_feature (2)..(3): n = unknown
  misc_feature (6)..(6): n = unknown
  misc_feature (9)..(9): n = unknown
  misc_feature (18)..(18): n = unknown
  misc_feature (44)..(44): n = unknown
  misc_feature (47)..(47): n = unknown
  misc_feature (53)..(53): n = unknown
  misc_feature (57)..(57): n = unknown
  misc_feature (68)..(68): n = unknown
  misc_feature (83)..(84): n = unknown
  misc_feature (86)..(86): n = unknown
  misc_feature (92)..(92): n = unknown
  misc_feature (119)..(119): n = unknown
  misc_feature (128)..(128): n = unknown
  misc_feature (133)..(133): n = unknown
  misc_feature (135)..(135): n = unknown
  misc_feature (139)..(139): n = unknown
  misc_feature (146)..(146): n = unknown
  misc_feature (153)..(153): n = unknown
  misc_feature (155)..(155): n = unknown
  misc_feature (163)..(163): n = unknown
  misc_feature (172)..(172): n = unknown
  misc_feature (178)..(178): n = unknown
  misc_feature (200)..(200): n = unknown
  misc_feature (204)..(204): n = unknown
  misc_feature (206)..(206): n = unknown
  misc_feature (232)..(232): n = unknown
  misc_feature (281)..(281): n = unknown
  misc_feature (320)..(320): n = unknown
  misc_feature (332)..(332): n = unknown
  misc_feature (378)..(378): n = unknown
  misc_feature (388)..(388): n = unknown
  misc_feature (390)..(390): n = unknown
  misc_feature (393)..(393): n = unknown
  misc_feature (462)..(462): n = unknown
  misc_feature (464)..(464): n = unknown
annccnccntcaccgaangggtttgccccaaaattttttttggngcngaaccngctngcaaagggggnaaccgttttttccgnncnaggagntggtaaaaattttttccatggtttttnggttaccancaaangncaantaaaccnttatggntngtccaaanggcttggcnctttgntaaaccggagttgcgatgcatncccncnccccccggcggaaaaatgcaaaagtngagatgctaagtagggcttaacccaggaaaccatcttgatagctaattnggatccaaatatcataagtgtccatttaatataataatncacaatgactgngcaattaatataaaaaattgtttaaaaattaaaatgataaaatgtnttttatgtangngcncaaccaaaatggcattactttagtaatttccggtttttaaaatttttaattttgaagcctttggaattncntgttcttttataaaaataaatcgtg

SEQ ID NO: 1081 - DNA, 386 bp, Ctenocephalides felis
  misc_feature (1)..(1): n = unknown
  misc_feature (7)..(7): n = unknown
  misc_feature (23)..(24): n = unknown
  misc_feature (40)..(40): n = unknown
  misc_feature (42)..(42): n = unknown
  misc_feature (49)..(49): n = unknown
  misc_feature (54)..(54): n = unknown
  misc_feature (57)..(58): n = unknown
  misc_feature (67)..(68): n = unknown
  misc_feature (74)..(74): n = unknown
  misc_feature (77)..(77): n = unknown
  misc_feature (118)..(118): n = unknown
  misc_feature (120)..(121): n = unknown
  misc_feature (124)..(124): n = unknown
  misc_feature (127)..(127): n = unknown
  misc_feature (129)..(129): n = unknown
  misc_feature (132)..(132): n = unknown
  misc_feature (134)..(134): n = unknown
  misc_feature (144)..(144): n = unknown
  misc_feature (147)..(147): n = unknown
  misc_feature (149)..(149): n = unknown
  misc_feature (151)..(151): n = unknown
  misc_feature (166)..(166): n = unknown
  misc_feature (176)..(176): n = unknown
  misc_feature (180)..(180): n = unknown
  misc_feature (182)..(182): n = unknown
  misc_feature (184)..(184): n = unknown
  misc_feature (203)..(203): n = unknown
  misc_feature (205)..(205): n = unknown
  misc_feature (222)..(222): n = unknown
  misc_feature (235)..(235): n = unknown
  misc_feature (244)..(244): n = unknown
  misc_feature (263)..(263): n = unknown
  misc_feature (267)..(267): n = unknown
  misc_feature (283)..(283): n = unknown
  misc_feature (294)..(294): n = unknown
  misc_feature (298)..(298): n = unknown
  misc_feature (353)..(353): n = unknown
  misc_feature (373)..(373): n = unknown
nacctcnttggatttgccccaannggttttgggccaattnancctttcntaccnttnncaaattggnncggtanttnccgacggtttttttaaaccaataattaaggggccaccgggntnncanttntnaantnttccagctcntancncnaaataccatattttnttcaatcatntatntntntaatttaggtttgggtttnangaattataccaccaatngtttctatcggcncatttaatnaaatatcctttcattatgncgancaaggacaagttttgnattaaaaaaantttntgttacttaatggacaatatttagaaatcacactttgaagactccttcctcgganccttccggggggcgccgagnaaaaccaacaatg

SEQ ID NO: 1082 - DNA, 436 bp, Ctenocephalides felis
  misc_feature (6)..(6): n = unknown
  misc_feature (8)..(8): n = unknown
  misc_feature (18)..(18): n = unknown
  misc_feature (43)..(43): n = unknown
  misc_feature (49)..(49): n = unknown
  misc_feature (61)..(61): n = unknown
  misc_feature (63)..(63): n = unknown
  misc_feature (70)..(70): n = unknown
  misc_feature (73)..(73): n = unknown
  misc_feature (141)..(141): n = unknown
gaattngncaggcagcanttggcttgcgggaaacccgtcctcnctggancttcaaccaggnanggaaaanganggttcctcatgggtcccatttttaacaaaaatgtcagctggccattgggaaaggtttccgattggttnaaaaaaccagcaaagccattagtcaaataaaaagaagtttgaaaatatcagatttttctgttccgagaatttaatactgtttactgaacctactattgtgaacaatgaagagttttttacctgcaaagactatatatctggatagaattttaccacctgtcgaatgtcagaagtctttatatgcatttaccctgacgagttcagaaaataaatctagaattttccatataaaatgctcaagtggcgatgaaagatcgtcctggatgctattattaggaatatttgttcagcacaa

SEQ ID NO: 1083 - DNA, 497 bp, Ctenocephalides felis
  misc_feature (3)..(3): n = unknown
  misc_feature (7)..(7): n = unknown
  misc_feature (9)..(9): n = unknown
  misc_feature (11)..(11): n = unknown
  misc_feature (16)..(16): n = unknown
  misc_feature (23)..(23): n = unknown
  misc_feature (28)..(28): n = unknown
  misc_feature (39)..(39): n = unknown
  misc_feature (57)..(57): n = unknown
  misc_feature (61)..(61): n = unknown
  misc_feature (63)..(63): n = unknown
  misc_feature (65)..(65): n = unknown
  misc_feature (76)..(76): n = unknown
  misc_feature (81)..(81): n = unknown
  misc_feature (92)..(92): n = unknown
  misc_feature (101)..(101): n = unknown
  misc_feature (160)..(160): n = unknown
  misc_feature (298)..(298): n = unknown
  misc_feature (336)..(336): n = unknown
  misc_feature (369)..(369): n = unknown
  misc_feature (412)..(412): n = unknown
  misc_feature (420)..(420): n = unknown
  misc_feature (427)..(427): n = unknown
  misc_feature (429)..(429): n = unknown
  misc_feature (436)..(436): n = unknown
  misc_feature (442)..(442): n = unknown
  misc_feature (454)..(454): n = unknown
  misc_feature (462)..(462): n = unknown
  misc_feature (474)..(474): n = unknown
  misc_feature (489)..(489): n = unknown
  misc_feature (490)..(490): n = unknown
atntttngntnccatngctcaanggcgntattggccccncagccgggcgtccaaaangctncntngtccgcaccgncttantcgtttggcangattatccntgtttaattttcgcctttcgtccccaaaatcttttgggatcttgatcatgtaaaagtgntttaacggctttgcttcgtatgcatgcaggtgcattatctacgagaagaaaaaaattggttgctgggggagagttacaagatcttatgtcgagactatgggccatataatcaatgggtgggggctggagaggatctgntttaagcattgctgaggatctgagaaatcgtaaatatncgatccattcatggacaggagaagtaatgattnctgagatgcatggctatggtaaaccatccgcattataaaaagnggttgccnccgcgtncncccatcncattgntgtcaattattnactggctnctgacaatgctntggcgttccaagatnncctcatc

SEQ ID NO: 1084 - DNA, 281 bp, Ctenocephalides felis
  misc_feature (22)..(22): n = unknown
  misc_feature (41)..(41): n = unknown
  misc_feature (44)..(44): n = unknown
  misc_feature (53)..(54): n = unknown
  misc_feature (63)..(63): n = unknown
  misc_feature (116)..(116): n = unknown
  misc_feature (206)..(206): n = unknown
aagtgtaactgtaattgatccnttttattttaaattacagntanaaattccgnnaaaatcttnacccgatgatatcacaaaaacgacttataaaaaattattaaagcaaatattgnttttactcttagaccgcggacaatgtgccatattgttgtaatggatttttgatagaaatgtagctttaaaaaaaaacatcttgactcggnatttattattattaaatcatcaatttgtgtgctttacaactaagctatatttctgatccaaaatgcaatactcgt

SEQ ID NO: 1085 - DNA, 489 bp, Ctenocephalides felis
  misc_feature (23)..(23): n = unknown
  misc_feature (33)..(33): n = unknown
  misc_feature (57)..(57): n = unknown
  misc_feature (82)..(82): n = unknown
  misc_feature (86)..(86): n = unknown
  misc_feature (90)..(90): n = unknown
  misc_feature (97)..(97): n = unknown
  misc_feature (107)..(107): n = unknown
  misc_feature (117)..(117): n = unknown
  misc_feature (123)..(123): n = unknown
  misc_feature (130)..(131): n = unknown
  misc_feature (133)..(133): n = unknown
  misc_feature (170)..(170): n = unknown
  misc_feature (175)..(175): n = unknown
  misc_feature (182)..(182): n = unknown
  misc_feature (185)..(185): n = unknown
  misc_feature (255)..(255): n = unknown
  misc_feature (258)..(258): n = unknown
  misc_feature (269)..(269): n = unknown
  misc_feature (274)..(274): n = unknown
  misc_feature (287)..(287): n = unknown
  misc_feature (293)..(293): n = unknown
  misc_feature (295)..(295): n = unknown
  misc_feature (310)..(310): n = unknown
  misc_feature (327)..(327): n = unknown
  misc_feature (349)..(349): n = unknown
  misc_feature (406)..(406): n = unknown
  misc_feature (408)..(408): n = unknown
  misc_feature (426)..(426): n = unknown
  misc_feature (438)..(438): n = unknown
  misc_feature (444)..(444): n = unknown
  misc_feature (451)..(451): n = unknown
  misc_feature (455)..(455): n = unknown
  misc_feature (457)..(457): n = unknown
  misc_feature (459)..(459): n = unknown
  misc_feature (471)..(471): n = unknown
  misc_feature (476)..(476): n = unknown
  misc_feature (486)..(486): n = unknown
ttttttttttttttttttttcgntttccgcatntccacaagccaaaaccaagcctgngccagcattaaaaacccaatccttntcgngttntttcagngctatttcanatattaactntgtttntaaccgnntnaataccttttcaggatcgcgtatggcctcatttttgngtgtnaacctgnggncaacatcgccaatccatgttaccaatcgatccttacgattagcaaacatttcaccgagtcccaaacgttnttntaacctatggnactgnatagctaattganggcaanancgccatgctgttgcncagaatccaaaccattngatttattggtttcatatctgntggactaacgcattcttttagttggtcttgagaaactctaaatcttcaaagttgggngngagaacaactaaacgagngccctgaatcgnaaattntccaaanattncncntcccggttttanaagangggaactggngaa

SEQ ID NO: 1086 - DNA, 389 bp, Ctenocephalides felis
  misc_feature (3)..(3): n = unknown
  misc_feature (23)..(23): n = unknown
  misc_feature (45)..(45): n = unknown
  misc_feature (51)..(51): n = unknown
  misc_feature (53)..(53): n = unknown
  misc_feature (65)..(65): n = unknown
  misc_feature (70)..(71): n = unknown
  misc_feature (109)..(109): n = unknown
  misc_feature (118)..(118): n = unknown
  misc_feature (128)..(128): n = unknown
  misc_feature (130)..(130): n = unknown
  misc_feature (276)..(276): n = unknown
  misc_feature (339)..(339): n = unknown
ccnggccaggtccattccaggangtgggaacctttttaaggaagnctcctnanggggggcatttnccccnngggggaccgggaaaaatcgcccattagcttgggtcggnccctggccnatatgtaatngnccaagggggtatcccctctttgcaatgggtgggaggttggctgggaaaaaggtactttactcctatcttctcaagactggcaaagggatttaaacttctttagttggaatttgggggatattagattagaaatataatggaaatgngaatatagaaaaaaaattaaatatacaatagtattttaaattggccacatctatctatgcatncataaataaaggtatatacagcattcaaaaaaaaaaaaaaaaaaaaaaaa

SEQ ID NO: 1087 - DNA, 499 bp, Ctenocephalides felis
  misc_feature (44)..(44): n = unknown
  misc_feature (47)..(47): n = unknown
  misc_feature (59)..(59): n = unknown
  misc_feature (74)..(74): n = unknown
  misc_feature (109)..(109): n = unknown
  misc_feature (248)..(248): n = unknown
  misc_feature (355)..(355): n = unknown
  misc_feature (436)..(436): n = unknown
  misc_feature (452)..(452): n = unknown
  misc_feature (454)..(454): n = unknown
  misc_feature (477)..(477): n = unknown
  misc_feature (492)..(493): n = unknown
ttttttttttttttttttggtaaaaaatttttcttttattaaantgntttaccacccanataatacctctggcntaaaattggaaattattctaacaaaagtttggggntatggcatgaatgccacttaacactaccagcaattttgtctcagcataaaatttcataaatagaggagctcaaaaagacaaaataaccataatatagtcattaacattaacaaaaatataatattatctattaaaaagnaaagcaaatataatctttgaaaaatattcttacacacactcacatatatatgcctttgcatagactccgaatggagcgagatcaaaataataacatgggcatcatcncactcaaagacaaatagtataataataatatgcgggtaaatatcattcattcattttttttttttattgccggttatccgnggcccaataataaaantnaattttcatattaaatttaaagncaatttggttaccgnngaagga

SEQ ID NO: 1088 - DNA, 303 bp, Ctenocephalides felis
  misc_feature (55)..(55): n = unknown
  misc_feature (101)..(101): n = unknown
  misc_feature (118)..(118): n = unknown
  misc_feature (120)..(120): n = unknown
  misc_feature (125)..(125): n = unknown
  misc_feature (256)..(256): n = unknown
  misc_feature (274)..(274): n = unknown
tttttgggcaaaaagactaacaattaataaccaacacataataaaaataaattgntgggatagaaaattgattcaattttctactcgattaacaaaattgncctttatctgattatgngntgggntttattatatattattattaatattgatcgatggatttaattacactgattttgcatttaagtgagtttatcctattattggttggttttggtatttaattaattgaccagcgtgagaagaactttcttgnagtctcctgatgtatcgncggagatcagctctccaaactctttccgt

SEQ ID NO: 1089 - DNA, 498 bp, Ctenocephalides felis
  misc_feature (479)..(479): n = unknown
acctaatattataatattaaaaacaaatcaataaaataaatagcaaagtaaattttagtgttaactttataaataccaatcatcatttttatatgatttgtataaaaacttatattccataaaataatttatatatcatgaacatagaaagtgtttatgtatcatttcattcttatatcaatctaaaaattataatattatgaaatataaattttagttgtaaaattgaaatatgtcgaggttataaatcataaaaaattataatataactatacctcctaaaatagcattgccaatagtttgtttatataaacttctggcgatcgaacttcttttcgttcatttcccgagattaaacatgaaaagcccacggttttcgaatgcattgaataaaatgatttgcttaatcgcagcctaatataatattcatcaggctattatgaaaatattggatacaatttttatataaaaccattctntagaaccattagaaaatat

SEQ ID NO: 1090 - DNA, 499 bp, Ctenocephalides felis
  misc_feature (16)..(16): n = unknown
  misc_feature (43)..(43): n = unknown
  misc_feature (58)..(58): n = unknown
  misc_feature (104)..(104): n = unknown
  misc_feature (121)..(121): n = unknown
  misc_feature (286)..(286): n = unknown
  misc_feature (405)..(405): n = unknown
  misc_feature (460)..(460): n = unknown
cacccccgagctttcnaattggtaatggtcgggactggacgtngcatcgatctttcgntttatcttggagactgggacttttagctgccaattcccgcagcagnggttgctttgtgcaggnggtcatcattttcgttgcattttacacatttcaggggatcatttttattacataggttactattgcactttagacaagacccagatgttgcattttcgcattcttttctaatcgaatcagcttcaggtaaatcgaccaaacaacctttttttgtttcagtgccgntaacatagatgtaacacaatccttcacattttttttctcccccgcatccgttgacatgacgggcgctcgaaatcttattattgcatgtagcaccgcacaagttttgcaaagagtattgncatcgcagatatcctcgtgcgcaccctcgattactttaccttttctagttagcgnagcataatctccattcatatgctaacaatcttgcttcga

SEQ ID NO: 1091 - DNA, 500 bp, Ctenocephalides felis
  misc_feature (10)..(11): n = unknown
  misc_feature (37)..(37): n = unknown
  misc_feature (42)..(42): n = unknown
  misc_feature (82)..(82): n = unknown
  misc_feature (365)..(365): n = unknown
  misc_feature (438)..(438): n = unknown
  misc_feature (444)..(444): n = unknown
  misc_feature (458)..(458): n = unknown
cctggctaanntttaagtgcttgggattctataaaanttggnttttaaaaaagctggatttataatacaaagcagggcttcnttttcgatttgtcacatatatattaacttttttcaaatcaatttatctatgcatttagtttatccattttctaacttacaaaatataattctaaatagttcaataagtaacagaatctaataataacataaaataataatatataacctctggacagtaaacatggtagagattttaaaatgacaaaacacattcttgaaaatgaagttcaaaacaatatctagttttgatcaagagtttctttggttatgactaaagttttcaaacatcacgtaagaatggnaataattgacttgaataatgcttcctatcaatcaatttttatgtaaatcataaaaggtaaaattaaacaggantgctgntataaaattactgncacttccccaaaatattatttcatctctaattaccatagata

SEQ ID NO: 1092 - DNA, 308 bp, Ctenocephalides felis
  misc_feature (34)..(34): n = unknown
  misc_feature (47)..(47): n = unknown
  misc_feature (72)..(72): n = unknown
  misc_feature (77)..(77): n = unknown
  misc_feature (80)..(81): n = unknown
  misc_feature (195)..(195): n = unknown
  misc_feature (298)..(298): n = unknown
ccccttcagtaatttctttttatttttaaattancgaaaaatcaganaacagttattccaaagatcatgggncttgntgnncttctttaagcttatttcctatcctaaagtgttaactattactacctaaactgcgatgatatttgtgatgaatgatgttgacatgatgtccgaagacgttggctaagatgcggnataattctgttcctggtcatcatcggttccctttcctggtaatctttacttgttcccaatcttcagcacggccgttctaacgtggagcaagcttcgagccagtttcttcaaag

SEQ ID NO: 1093 - DNA, 498 bp, Ctenocephalides felis
  misc_feature (298)..(298): n = unknown
  misc_feature (337)..(337): n = unknown
  misc_feature (418)..(418): n = unknown
  misc_feature (435)..(435): n = unknown
  misc_feature (439)..(439): n = unknown
  misc_feature (447)..(447): n = unknown
  misc_feature (469)..(469): n = unknown
  misc_feature (476)..(476): n = unknown
  misc_feature (482)..(482): n = unknown
  misc_feature (491)..(492): n = unknown
  misc_feature (495)..(495): n = unknown
tatcagtatcacccttacgtgaatactccgaaaaaatcattgaagcacgaagaacagaagcaccttacttactaccaccgcttttaagccactacgatagttcccaaacaagacctttatccagcttgcagcatctcatgatcgatcaaaacactttaatcgaaggcttgaaattggttggtgtcgatggatcttcattaaaacaactagctcactttgcacattgcccgataactatgaacatgggtcacagacatagttgggtcgaggctggcacttctttaggaagtgcttcggntttgagctctttaaacaacgatgtggatagcgcacaagntcaccaggattatccaggaaaattaacacccgaagaatattctttttgtgtcatggaacgagcagtaaatggaccaactgngtctggacaattactgnaganggaccatntaacgctttgccaagcgtttanaaatgancatttntgaatgtgnnccnaac

SEQ ID NO: 1094 - DNA, 228 bp, Ctenocephalides felis
  misc_feature (7)..(7): n = unknown
  misc_feature (125)..(125): n = unknown
  misc_feature (169)..(169): n = unknown
cgttttnacagcaaaaaaccaagccttgattggccgaagtggtcgggtggcttctcatgtggattcatataaatcaagcttttgtggttgctttgtgatgaatgggtgctttggttgaaattggntcttcatggttcatttaagattcaacgatcctggtgaattgggntgaaccaactcggctccaaaatcaggcgacgaagaagagctttcctgaatcctctccgt

SEQ ID NO: 1095 - DNA, 308 bp, Ctenocephalides felis
  misc_feature (9)..(9): n = unknown
  misc_feature (17)..(17): n = unknown
  misc_feature (26)..(26): n = unknown
  misc_feature (49)..(49): n = unknown
  misc_feature (51)..(51): n = unknown
  misc_feature (58)..(58): n = unknown
  misc_feature (72)..(72): n = unknown
  misc_feature (85)..(85): n = unknown
  misc_feature (94)..(94): n = unknown
  misc_feature (194)..(194): n = unknown
  misc_feature (206)..(206): n = unknown
  misc_feature (244)..(244): n = unknown
  misc_feature (304)..(304): n = unknown
cctaatggnggttttangctaaccangaaaaataagggttaaaaaaggncnaaccttnaaatgggataaaanccattaaaatcantttctttancacattctagtcacacactttgatccgaaaggttgccccgaatcggcagaatttatgaattttattataaattcacaatgatcgcatcacataaaattgnctttaaatctgnttatcttgcaggaaaaatatcgcaaacacgtttttttntggcttctaactcaatatttaacacacgtaaattatcacaccgttaggcaagctgatggnctgg

SEQ ID NO: 1096 - DNA, 335 bp, Ctenocephalides felis
  misc_feature (109)..(109): n = unknown
  misc_feature (174)..(174): n = unknown
  misc_feature (269)..(269): n = unknown
  misc_feature (302)..(302): n = unknown
  misc_feature (304)..(304): n = unknown
  misc_feature (335)..(335): n = unknown
ctttctttaaaattgtaacatctatatcatgaaatcatgatcggctccctggtttatttctaccgattactacagtattatatttataatatgttcaatatagcactgnggtccaattttattttgaccaaaggtttatataaaaatccaggttttcttgatcatgtaaaatgntggtccattatcttaaattattatattcagaatgatatataatccattcaactttctaaaacaaacaagaaatctgtgcaacgtctgatatctgngaatatgtattggatttaatatatatgttaagngnttaaaaatatatttctatttcatatacttgn

SEQ ID NO: 1097 - DNA, 500 bp, Ctenocephalides felis
  misc_feature (55)..(55): n = unknown
  misc_feature (69)..(69): n = unknown
  misc_feature (86)..(86): n = unknown
  misc_feature (150)..(150): n = unknown
  misc_feature (233)..(233): n = unknown
  misc_feature (441)..(441): n = unknown
  misc_feature (449)..(449): n = unknown
  misc_feature (457)..(457): n = unknown
  misc_feature (481)..(481): n = unknown
  misc_feature (498)..(498): n = unknown
ccttagacctccaaatctttttttaaggaaaaatcccccggaaaaatagcccttncatattccgcctgnttatacttgtgacaagnttaaaggatttaatttaagcgacttctgtatttatgtaattcacctactctaaattaagactgnaatttatcattatctgacatagttttttggttttacgtattttttattaaaattcttgtgaagttcaacaagtagaatattgnttttttaattgggttatttggaccttagaatattctaaaatactctatttacatagagagagcaagatgcttaaatttatacaatatgtcgagtaaaaccaaaaaaaacgtaaacttgcatgctttctagacatgctgctataatcataaaaaacagttttgccatcttgaaataaggcagacttatattatatacattaataatggntcgacacntattgtgntcattggaatgaaataatcagggnggaatataattttcttntg

SEQ ID NO: 1098 - DNA, 392 bp, Ctenocephalides felis
  misc_feature (4)..(5): n = unknown
  misc_feature (7)..(7): n = unknown
  misc_feature (11)..(11): n = unknown
  misc_feature (13)..(13): n = unknown
  misc_feature (34)..(34): n = unknown
  misc_feature (45)..(45): n = unknown
  misc_feature (53)..(53): n = unknown
  misc_feature (55)..(55): n = unknown
  misc_feature (68)..(68): n = unknown
  misc_feature (74)..(74): n = unknown
  misc_feature (309)..(309): n = unknown
cacnntntttntntaagttttttccctgtaaatngtaaatatgantttggttngngaaaatagtggcnggggtncatgttaaccaaaactatgggacctcttggataatttaatcacttatttatatttgcccgcgtggtaatatttaagatatgaaatctatagaagcgatcctttgtatgacaaagttgacattgttaatcatatatccaatgatttgcgacatatgttatggtgctatttgcccttaaaaatctacatgtgtagtgaatttgttctgcttctacgtgataaatgcttggatatagngtttgatctttttataaatatcatatatattggattaaacaatcaaaagaaataaaaatgtaaaaaaaaaaaaaaaaaaaaaa

SEQ ID NO: 1099 - DNA, 362 bp, Ctenocephalides felis
  misc_feature (29)..(29): n = unknown
  misc_feature (77)..(77): n = unknown
  misc_feature (146)..(146): n = unknown
  misc_feature (251)..(251): n = unknown
  misc_feature (268)..(268): n = unknown
  misc_feature (310)..(310): n = unknown
ttttttttttttttttttttttttttcanttttctatcttttattatttaagccataaatatatatatagtataagnataggctaactaccttttattattcccgaaaccatttcaataatttcaactattcttagattttctttnatttctcagacaaaaccacatatgcttgttaatctcaaaacgaataattatcatttttgtttatgactatataattatacatatgcgggcctacttagtattcanaaatactttatacaggnagcttatcattttagataatatcattcaattttgttatttgnattacttcaataaaaataacacctaatatattttttcaattgatgaaatatg

SEQ ID NO: 1100 - DNA, 498 bp, Ctenocephalides felis
  misc_feature (4)..(4): n = unknown
  misc_feature (12)..(12): n = unknown
  misc_feature (22)..(22): n = unknown
  misc_feature (94)..(94): n = unknown
  misc_feature (207)..(207): n = unknown
  misc_feature (259)..(259): n = unknown
  misc_feature (262)..(262): n = unknown
  misc_feature (401)..(401): n = unknown
  misc_feature (443)..(443): n = unknown
  misc_feature (480)..(480): n = unknown
caangaatatangggtttttantggcaccataatggcttttaaacttggggttggttggaaaaacaaatttgggttggaggggataaccgccanttttaggattcaaaatacctccgccaatcacacaaaaacacttttaaaattccttctaccagaaaaaaaaatggcaaaaagaaaaacacgtttttaaccagttacaggagtgntactcctcaatccaatgaaattttatgcagttctgttcaaaattatatctgntgnaatatttaaaaaagttaaacttttgcttaaccaatgaaaataagatctcaatagaagacttaaattaaatatgatagtgatcatgagcatatgttcataaatcaactttctgattgattttctatgataaatgcattgnctacactatttacttactactacacggtccttacaggaatgnatataaattaaaatatgcatatatttatattcattgngggaaaccggatttggaa

SEQ ID NO: 1101 - DNA, 319 bp, Ctenocephalides felis
  misc_feature (5)..(5): n = unknown
  misc_feature (7)..(7): n = unknown
  misc_feature (33)..(33): n = unknown
  misc_feature (41)..(41): n = unknown
  misc_feature (65)..(65): n = unknown
  misc_feature (81)..(81): n = unknown
  misc_feature (117)..(117): n = unknown
ctacntnaaagggggtggcttttcttaagcagntggcatancccaaggcagcacccactgcaaanggctcttataaaaaanaggtatttctttggcaatttaaattctttctttcanctgtaagacccgtgatacccattttttttggcttttcttttgatttttctttaagcaattccctctgctttgtcaattttcctatcaacaaatctctcaattttatccattaatttaggagtttctccagtaacaagcctcttcaattttatctgtcaccttatcagcctttttagttactttatcccagtcaatagaaatg

SEQ ID NO: 1102 - DNA, 283 bp, Ctenocephalides felis
  misc_feature (7)..(7): n = unknown
  misc_feature (14)..(14): n = unknown
  misc_feature (25)..(25): n = unknown
  misc_feature (41)..(41): n = unknown
  misc_feature (94)..(94): n = unknown
  misc_feature (137)..(137): n = unknown
ttgggcntttggtnggtattttaanaacaagaagcattttnttgggacttggacttttcactactcataagaaagcatcaaaagaaaactgggnctgggtattttggtggagggttgggactaaatatcatcgatcnggggttttacttaaaacttttccctcatatccttaaaaatctcttgatgggcttccaaaacttgtccgagaatttcacaaaagtaacctccgttccaaaagaactttttgtcaaaacacgtggggttaaaagtgcaggtcacaagt

SEQ ID NO: 1103 - DNA, 287 bp, Ctenocephalides felis
  misc_feature (46)..(46): n = unknown
  misc_feature (61)..(61): n = unknown
  misc_feature (63)..(63): n = unknown
tatcaagcaaactgaatttgatctgaggtaaaactgaattcaaganataaaagcatcaccnantatgtatagataaaagataaagattgtaaaaagtttgagaaacactgtttggatggtgaaacgaaatatagaaaacacaaaagttaaaatatatatatactcagccccaaataatataatttaaaattatggttaagtttgtttagtagctcagtggtaatagcattagccttgcaaccagaattgcagattccattccctcattaaacctgatatcaagcagt

SEQ ID NO: 1104 - DNA, 434 bp, Ctenocephalides felis
  misc_feature (9)..(9): n = unknown
  misc_feature (20)..(20): n = unknown
  misc_feature (24)..(24): n = unknown
  misc_feature (32)..(32): n = unknown
  misc_feature (87)..(87): n = unknown
  misc_feature (108)..(108): n = unknown
  misc_feature (113)..(113): n = unknown
  misc_feature (141)..(141): n = unknown
  misc_feature (167)..(167): n = unknown
  misc_feature (196)..(196): n = unknown
  misc_feature (200)..(200): n = unknown
  misc_feature (214)..(214): n = unknown
  misc_feature (219)..(219): n = unknown
  misc_feature (221)..(221): n = unknown
  misc_feature (239)..(239): n = unknown
  misc_feature (242)..(242): n = unknown
  misc_feature (249)..(249): n = unknown
  misc_feature (317)..(317): n = unknown
  misc_feature (434)..(434): n = unknown
accatatcntatttttggantaantggaatgncatttaatttggctactaatacttctatggaaattcattttttaaataaggtggnttaaataaataatttcattgnaaagncacatcaaaacttttctccaaatatagntctataatatttagtttttagcctgntatcactattagattaaattataaattgnttgnaattggctaattgnaaagngnttataaatgaacttttgntgncatttgntatgaagatatatgtattttgaagcatattttttgtaacattgtgcaaatgcttatttgtttggttgnaataggaaaataattatgattcttattactcattaaactataataaattttagcccatggtaaacattacaattaagtatctatttagcaaaaaaaaaaaaaaaaaaaaaaaaaaan

SEQ ID NO: 1105 - DNA, 498 bp, Ctenocephalides felis
  misc_feature (1)..(1): n = unknown
  misc_feature (16)..(16): n = unknown
  misc_feature (30)..(30): n = unknown
  misc_feature (32)..(32): n = unknown
  misc_feature (35)..(35): n = unknown
  misc_feature (67)..(68): n = unknown
  misc_feature (83)..(83): n = unknown
  misc_feature (86)..(86): n = unknown
  misc_feature (120)..(120): n = unknown
  misc_feature (128)..(128): n = unknown
  misc_feature (134)..(134): n = unknown
  misc_feature (139)..(139): n = unknown
  misc_feature (142)..(142): n = unknown
  misc_feature (155)..(155): n = unknown
  misc_feature (199)..(199): n = unknown
  misc_feature (203)..(203): n = unknown
  misc_feature (231)..(231): n = unknown
  misc_feature (239)..(239): n = unknown
  misc_feature (246)..(246): n = unknown
  misc_feature (252)..(252): n = unknown
  misc_feature (295)..(295): n = unknown
  misc_feature (315)..(315): n = unknown
  misc_feature (332)..(332): n = unknown
  misc_feature (334)..(334): n = unknown
  misc_feature (425)..(425): n = unknown
  misc_feature (462)..(462): n = unknown
  misc_feature (465)..(465): n = unknown
  misc_feature (475)..(475): n = unknown
  misc_feature (487)..(487): n = unknown
  misc_feature (493)..(493): n = unknown
ntttgagcccctcggngtcttgaaagcccntnaanggggccccgggcgggggaccaagcccaaaggnntatttggttctttcnacnggtaatcaaaaattggccttttatattttaaaantggataanttaagntttantanttggcccccgganaatcgggccataaaaaaaaaaaaatggatggatggtttttaacncccnaattattattataccatttggtctttgnggggggangaatgcnccctgntattattttggaccccgcccccttcgggggctatgccaagggntatattgggaggtggggggnaagaatatttttcaaanantatattttgctttaccttttaatagaaaatattatatttttggtaatggtaaatggctatattaatgggtattttggtctttttgagcccnctatttatgaaatttatgctgggaccaaattgctggnagnggtaagtggngcattcatgccntaactnccaac

SEQ ID NO: 1106 - DNA, 500 bp, Ctenocephalides felis
  misc_feature (3)..(5): n = unknown
  misc_feature (19)..(23): n = unknown
  misc_feature (27)..(27): n = unknown
  misc_feature (37)..(37): n = unknown
  misc_feature (39)..(40): n = unknown
  misc_feature (46)..(46): n = unknown
  misc_feature (50)..(51): n = unknown
  misc_feature (56)..(56): n = unknown
  misc_feature (73)..(73): n = unknown
  misc_feature (108)..(108): n = unknown
  misc_feature (126)..(126): n = unknown
  misc_feature (131)..(131): n = unknown
  misc_feature (155)..(155): n = unknown
  misc_feature (171)..(171): n = unknown
  misc_feature (174)..(174): n = unknown
  misc_feature (176)..(176): n = unknown
  misc_feature (179)..(179): n = unknown
  misc_feature (197)..(198): n = unknown
  misc_feature (201)..(201): n = unknown
  misc_feature (210)..(210): n = unknown
  misc_feature (216)..(216): n = unknown
  misc_feature (228)..(228): n = unknown
  misc_feature (230)..(230): n = unknown
  misc_feature (243)..(243): n = unknown
  misc_feature (254)..(254): n = unknown
  misc_feature (295)..(295): n = unknown
  misc_feature (307)..(307): n = unknown
  misc_feature (325)..(325): n = unknown
  misc_feature (330)..(330): n = unknown
  misc_feature (351)..(351): n = unknown
  misc_feature (378)..(378): n = unknown
  misc_feature (390)..(390): n = unknown
  misc_feature (400)..(400): n = unknown
  misc_feature (402)..(402): n = unknown
  misc_feature (417)..(417): n = unknown
  misc_feature (432)..(432): n = unknown
ggnnnttttgaagcccttnnnnnaaangaagctcttngnnagctcnaatnncgttnggccgaccggcccggtncaacagtggcatggaccttggcctttaacggtcanttctaaggatgggggttntttantcttggggtgggatatggctttangggccttaaattcttnctnangancccaaattactaaatcannatncaagccttntttggnttggccttttangncatccaagccagntaatttcgcanggcccgcagataataaacgagatcatcatgagctttaaagncctttttaaaancaccgggccataataaanatatncaaactggataccaacaattncaccccaagcttttaaggaatcaaggnggacaccattgnacaggccttnantgcacaagtggaggngaatgacactgcttncatatcatatctttgttttcaaagcttgcataattttctggataccttcttctctaatgggggacgca

SEQ ID NO: 1107 - DNA, 370 bp, Ctenocephalides felis
  misc_feature (42)..(42): n = unknown
  misc_feature (49)..(49): n = unknown
  misc_feature (52)..(52): n = unknown
  misc_feature (59)..(60): n = unknown
  misc_feature (86)..(86): n = unknown
  misc_feature (102)..(102): n = unknown
  misc_feature (108)..(108): n = unknown
  misc_feature (112)..(112): n = unknown
  misc_feature (117)..(117): n = unknown
  misc_feature (120)..(121): n = unknown
  misc_feature (131)..(131): n = unknown
  misc_feature (134)..(135): n = unknown
  misc_feature (159)..(159): n = unknown
  misc_feature (161)..(161): n = unknown
  misc_feature (169)..(169): n = unknown
  misc_feature (179)..(179): n = unknown
  misc_feature (184)..(184): n = unknown
  misc_feature (192)..(192): n = unknown
  misc_feature (199)..(199): n = unknown
  misc_feature (212)..(212): n = unknown
  misc_feature (217)..(217): n = unknown
  misc_feature (222)..(222): n = unknown
  misc_feature (242)..(242): n = unknown
  misc_feature (258)..(258): n = unknown
  misc_feature (282)..(282): n = unknown
  misc_feature (297)..(298): n = unknown
  misc_feature (310)..(310): n = unknown
  misc_feature (332)..(332): n = unknown
  misc_feature (362)..(362): n = unknown
  misc_feature (365)..(367): n = unknown
cctacctttaccttctcacttacccttacctacgctttaccnacccttnccnacccttnnaccccgggcctttttactggttactnactattggctaggggntttggngctnaatcnccnncgaagagctnctnnaagaaagaacaggcaaattttggntnacaacctncattctttgntaccnatcattantatggcnactactctatggncaccnatcgnttaacaatcaggcaatctgntcttggttttgggggncggggattgaaacccgaatcgggnttcgaaaatgaacannaatatttggccntattaaatggtggtaaaatatnccaattaatggattatttcatcactttcgnaannnaaa

SEQ ID NO: 1108 - DNA, 149 bp, Ctenocephalides felis
  misc_feature (10)..(10): n = unknown
  misc_feature (37)..(37): n = unknown
tttttggtgntatatcactttcctttgcaggtgcctntgaaccgggcgtcttatttaaatcatcgctttcttgattattatcctcagcgctttcctgattggtatcgtctttatgcgtcaaagttgccaagatcgttgcattatttggt

SEQ ID NO: 1109 - DNA, 498 bp, Ctenocephalides felis
  misc_feature (65)..(65): n = unknown
  misc_feature (423)..(423): n = unknown
  misc_feature (441)..(441): n = unknown
atattagtaataagtggccatcaaagatattaaaattaatttgccagtcctgtttattgggggangaacttcaaaatcatctattacaaggattatttcaagtgccattggtagataaaacataaagtagatataccttaatgccaggagtatatatataactaatgaaaaatgaactaaatttgaactggatttcaaattttgactggatctgtaactttttgtagttcccttctattaaataggatatttgtattcaccgcattttatgacctgaaggaggtcaaatattccactgtttcttttgcataaattttattaagtgatagtaagaattttatacttagggctaatcaaaagagccggcacacttattttttctaatttcataattaaaaattggctatatttgtcctaagttgnaaaggtcttagttattgnaaaattatattatagcgatagattcattttcattgtgggatgacttattgattgaca

SEQ ID NO: 1110 - DNA, 400 bp, Ctenocephalides felis
  misc_feature (27)..(27): n = unknown
  misc_feature (59)..(59): n = unknown
  misc_feature (96)..(96): n = unknown
  misc_feature (263)..(263): n = unknown
tttattctataatgaaatgaataatgntactccaaatataatagtatgtctttcatggnaaatttatatgtatatatattatatttatatatttgnatatatgcacaattgtgtatgcttatatctttacatatgtgcaaatatagttttatggatgtatatagatgtgtaagaatattttatgtaatttttattaactcgtttaaaattgagtttattacttctaaaaccacttgcaatttgattgactttttggatactgntctaattaaagtatgatgcattttaaatatgaaaatagaaatagttaacagtaaactaaacaagctttgttgctagtgtaaaatggaaaaatcatttatgtttttatagcttttaaacatgtttcaatttgataagg

SEQ ID NO: 1111 - DNA, 379 bp, Ctenocephalides felis
  misc_feature (51)..(51): n = unknown
caaatattggtgcatcacaggctcatgggatatttataaaacatagaatgnggggaatatatcaatcatataaaatttacatgcttcatactagacaaacaattaaagatcaaacattattttttatacatttatatataaaattgaatgatcaaattctttctttgcaaaaaccacatattattgaagcataaatttagaaatcaaataaataaaatagcacaccaaacattatgttattagtttatgtgtcaaatcacatattgttataaattttgagtaatatacaattataggcgtgttttttacatttttcatttcagaggtctttaaaacttatacaatatattatttactattattgttaaaacggtttagt

SEQ ID NO: 1112 - DNA, 486 bp, Ctenocephalides felis
  misc_feature (9)..(9): n = unknown
  misc_feature (16)..(16): n = unknown
  misc_feature (34)..(34): n = unknown
  misc_feature (38)..(38): n = unknown
  misc_feature (49)..(50): n = unknown
  misc_feature (74)..(74): n = unknown
  misc_feature (86)..(86): n = unknown
  misc_feature (88)..(88): n = unknown
  misc_feature (94)..(94): n = unknown
  misc_feature (118)..(118): n = unknown
  misc_feature (130)..(130): n = unknown
  misc_feature (187)..(187): n = unknown
  misc_feature (211)..(211): n = unknown
  misc_feature (272)..(273): n = unknown
  misc_feature (315)..(315): n = unknown
  misc_feature (335)..(335): n = unknown
  misc_feature (373)..(373): n = unknown
  misc_feature (382)..(382): n = unknown
  misc_feature (395)..(395): n = unknown
  misc_feature (448)..(448): n = unknown
  misc_feature (466)..(466): n = unknown
tttttaagnccccttnttgaaagccctttggggnttanccgtgggtccnngggcgggggtccccccaaggtggnattgggggaaancntacccnccaaattttttttaaccaatttanttaataccttantgggcctaagaaaaggccgaaggtggtaaaggttcaaggggttggtattagcttaantaaaaggtaaaactttttaaaaanggtgatggaatttatctggcaaaataggtccaaaattcaaaaaattactattattaatggnntattggaaataatgctttttattaggaattggcattttcaantctggtatttaaaattggtntggtaaaatcaccagcaccaaggatcccaaccacacantttcatctnaccagaaagaacnaaaattaattttaatggttattaaaaattacattattaaaataactttttacnaataaaggtaaccctacnttgagaatggtgttggtttc

SEQ ID NO: 1113 - DNA, 500 bp, Ctenocephalides felis
  misc_feature (6)..(6): n = unknown
  misc_feature (21)..(21): n = unknown
  misc_feature (26)..(26): n = unknown
  misc_feature (33)..(33): n = unknown
  misc_feature (37)..(37): n = unknown
  misc_feature (41)..(42): n = unknown
  misc_feature (60)..(60): n = unknown
  misc_feature (69)..(69): n = unknown
  misc_feature (83)..(83): n = unknown
  misc_feature (101)..(101): n = unknown
  misc_feature (179)..(179): n = unknown
  misc_feature (185)..(185): n = unknown
  misc_feature (207)..(207): n = unknown
  misc_feature (216)..(216): n = unknown
  misc_feature (343)..(343): n = unknown
  misc_feature (387)..(387): n = unknown
  misc_feature (409)..(409): n = unknown
  misc_feature (423)..(423): n = unknown
  misc_feature (457)..(457): n = unknown
  misc_feature (460)..(460): n = unknown
  misc_feature (464)..(464): n = unknown
  misc_feature (471)..(471): n = unknown
  misc_feature (500)..(500): n = unknown
ccgacnggtggaaattggcantgganccagccnaaantggnngggcccgggcaaaggtantaaaagaantggggattgggcantttattgacgggggcaanaacttttggcgaattttttttaacacatatttttagaaatggacatatcatagttagggtggggattcgaaaaactgnctttancatcttttgaaaataaggtatnttgggcagnctttcggatctggctgatatcctacaacccgcgccatgtagtttctgccgcttacaagttttcccaaggttttgatgagccatatcatctacacaaaatgggacatcggaattgaagctctgcaatngattggtggaattgggggttctttgtcacgccacttcaaagtanacaatcgtgacaaatgttccantggtattatacctnggccggacccgctaagccaaatttgagattcatnaantggnggccgtngagctgctttaaggccaatcgcctatagn

SEQ ID NO: 1114 - DNA, 500 bp, Ctenocephalides felis
  misc_feature (60)..(60): n = unknown
  misc_feature (482)..(482): n = unknown
  misc_feature (491)..(491): n = unknown
gctagctacaagttgttgaaatattattaaattttattattatatttgttttttttctgnatggggtttaaattacattccatgataattttcagttttatataatctaataaattcaatttaactgttgaaatttgatcatattgtgtatatacatagcaatataaaatataaagttacacattgtctgtttcattataactgtactgcaaaattaattattttgattgtttgttactgtattattaaagttattcagattcagtcaaaatttaaatgtttggcctaaacttattattgaaatattgccaatagtgtattattacttagcaattatgtataaagattttatttattaaagcaatattcgaatgtctgtaatatcataaattatgtatataaataaatatatcaatgtgaacaataacagagaacataagctcaaaatcatcatactatgtctggaaaatcaaatataaatngtttttagngtaaataaa

SEQ ID NO: 1115 - DNA, 500 bp, Ctenocephalides felis
  misc_feature (5)..(5): n = unknown
  misc_feature (7)..(7): n = unknown
  misc_feature (204)..(204): n = unknown
  misc_feature (399)..(399): n = unknown
  misc_feature (407)..(407): n = unknown
  misc_feature (415)..(415): n = unknown
  misc_feature (473)..(473): n = unknown
  misc_feature (478)..(478): n = unknown
ttttntngttttttttttttttttttttggggattagaaaattaatatttcatttaaaaaaataatggggtattacaggattattgtttctataaacaaactacataatatggcatgatttttttcaataatcaatttgattcgcaaatgaatcttctggctggatgcagattttgtcgttccatccttccttgctggatttgnatactgcttctacacaattttcttttcctctgtaattatttgggtcaccacgaacccatttttcaaaagtcatgggctttgaattttcaatatgcccacaaattttgatcgatctgctagattgttaccagctgtccaaaacatttgtttggcacggtaattgctgttaacaaatttctcaaattttcatattgnaatggagntcaatggntgccaccctgcgtccaagcttttttaccaaaagcattttggtcaaccagttcacttangaggncgaaaatgaaaactttttccgt

SEQ ID NO: 1116 - DNA, 317 bp, Ctenocephalides felis
  misc_feature (37)..(37): n = unknown
  misc_feature (45)..(45): n = unknown
aggggaaaattcttttttttgaaaactgggattctgnagtttgcncgccgggtggctttgcgacgtttttagttccttgaacgacataatcattattcatttcttgagagtctatcaaactgattataattgcttcgttttcgttcaccgcagttttggcttgttttatttccggtttcttttgtagttcaagttctacatttgtctgactcattatattttcggttacaataagaggttcttgcggtttttgtattaattttgcattatctaatctcttagtatcttcaacaaactcactttctttttcacgaagt

SEQ ID NO: 1117 - DNA, 307 bp, Ctenocephalides felis
taccgtattcaggtcccaaaccatcattaaaatggtagcattaatcaaaaatcaaagaatcattattcaaattccaaggaagtaaaataaaaaataatttctttattcacttattgggagtgagtataaatctaattttggattcccgatgattgttgcaaagctccattagtctttattaatacatttttatttttttatttatttgcattgtaattgttgattcagacaccgcacacgaccgccgacatggcgctgtagtcttgctcctctgccggccgtaacgtcaaagtaatttggttgttgt

SEQ ID NO: 1118 - DNA, 374 bp, Ctenocephalides felis
  misc_feature (13)..(13): n = unknown
  misc_feature (22)..(22): n = unknown
  misc_feature (25)..(25): n = unknown
  misc_feature (27)..(27): n = unknown
  misc_feature (87)..(87): n = unknown
  misc_feature (143)..(143): n = unknown
  misc_feature (146)..(146): n = unknown
  misc_feature (217)..(217): n = unknown
  misc_feature (374)..(374): n = unknown
ctgggggaaaggnctccaaccnagngnccggttttgcaaaaaaccactcttggctggtttggaattctcatctattaaattaagaantcttttgcttcatttcaattattttcaaaatatgattgatctcttcttcagttggnggntcccggccgtctatttcgcaaccatgcttccattctgcagggaattcctgatcaaacttttcttttattgntggctcaaaatatctattcgctttgcgtttaccaatgctaggatttcctggagtttcataatacttattgcctaggtgatcttttccaataaagtttgctttaatatttgcttttccaatcttgaatgagttataaaggttttaaagacttgaaggn

SEQ ID NO: 1119 - DNA, 498 bp, Ctenocephalides felis
tttatcaaaaatcctagtttatgagtagtgtgaagccagaaggccgtaaggtcgtgaaagatctgaacgtccatcaacatcttcaatggatgaaatcgtcgcctaagtcaagaaatggtgttggtaaactaccatttaggttcagtcaagttagtttttgaccttaacatatctaacaaatcaattataccatcaaattgggcatgagacgctttgctgttcatctctaccatcattgttgaactctcttcacacaacgcctatattgtgaacgcttttttggccataaactcatgaaatatcatgggacaaccaacgtattcactagatctatccttctgtaaattatttattgtcatggatacttaagtatagaattacaagtaatactattgttagatacctctttggatcgatagattccactacaatggttggtaagaaaaaaacgccaaagggctgaagaatatccttataaaggcgtttaaaagatgcttt

SEQ ID NO: 1120 - DNA, 455 bp, Ctenocephalides felis
  misc_feature (5)..(5): n = unknown
  misc_feature (72)..(72): n = unknown
  misc_feature (415)..(415): n = unknown
  misc_feature (422)..(422): n = unknown
gcgtnacatatctggaatttttttggtgaattatttttaatgtaataaatcatagtaatatttatttccaangtgcaaatatggaaactaccatccctatattatatataattgtatatattcctgaattgttttatttgaatttattttaaacacaaactttaattatattcaaataatgatggatgtgatttcatatatccctaaactttggatcagagtttgagagaagcctagccatagtgtatagaaaattatgtgtaggtgtataattaagattgcaggagtcaaatatataaagcattgatacaaattatacattccaattttctgtaaaccgtgttctttggttgattatggtttatatcacaatttatgaatcatgtaaattaattgtaaatttgaaatgtatctncgatgtnaatgtattgaaaaaaaaaaaaaaaaaaaaaaaa

SEQ ID NO: 1121 - DNA, 500 bp, Ctenocephalides felis
  misc_feature (12)..(12): n = unknown
  misc_feature (18)..(18): n = unknown
  misc_feature (21)..(22): n = unknown
  misc_feature (36)..(36): n = unknown
  misc_feature (40)..(40): n = unknown
  misc_feature (48)..(49): n = unknown
  misc_feature (119)..(119): n = unknown
  misc_feature (500)..(500): n = unknown
cttgaagccctngggagnacnnaagcccttcggcgnccgncaggggcnnacctcccggcaggggctcgtggggtagttcttggcaaattaattattattcattaatatggatttatatngatatggaataaaaatcccagcaatcacattctatcaaaaataaacttaattcaattcagtttggaaagttttaatcacaaagtctaaattatcataaatagccattatcaactgcatgccgaacattatccactaatcttaaacgaccttctttatgagcaattggacgtactttccatactgttgttataggcacagcatcatcgctctctatcatatccaagtctgggcatcatcatttttcataagagtgaatggcactgattctaagctgaatcctaaaccaaattttgaatatatttttaactcatcatgaaatgcattttttggatacattttttctgggctgctcccaattctttaattgagtagcataagcn

SEQ ID NO: 1122 - DNA, 500 bp, Ctenocephalides felis
  misc_feature (12)..(12): n = unknown
  misc_feature (44)..(44): n = unknown
  misc_feature (88)..(88): n = unknown
  misc_feature (197)..(197): n = unknown
  misc_feature (392)..(392): n = unknown
  misc_feature (419)..(419): n = unknown
  misc_feature (421)..(421): n = unknown
  misc_feature (423)..(423): n = unknown
  misc_feature (440)..(440): n = unknown
  misc_feature (500)..(500): n = unknown
ttggattattgnaagacaattgcaattatatttcaacaactggnttagttaccgaatataatttataggattcataaaaactaattgngttcaattatcattcacaatattcataaataagcaaataaattattcaataaaatatataaaattgatgtttctgtaacatatatactataagataataataggattgntagaaaactttaaattaaagtgaagtctatttctttagttctttaaggggcttgcatttagatcaatttcaagactattctcaggactagaattcaattggacattattgatctctgcacgatgttttccatcagagacagtcgttacgcttctgtaaaatgaggaccaagcgggcatttgattggtggtagtgncgcattctgaacttccaaattgtggcngngnatcgctactcacgaagnatttcggtaaattcctggggcattatctaaatcttctattggtttagcatggtacagttn

SEQ ID NO: 1123 - DNA, 415 bp, Ctenocephalides felis
  misc_feature (7)..(7): n = unknown
  misc_feature (17)..(17): n = unknown
  misc_feature (21)..(21): n = unknown
  misc_feature (24)..(24): n = unknown
  misc_feature (32)..(32): n = unknown
  misc_feature (95)..(95): n = unknown
  misc_feature (98)..(99): n = unknown
  misc_feature (101)..(101): n = unknown
  misc_feature (110)..(110): n = unknown
  misc_feature (141)..(141): n = unknown
  misc_feature (198)..(198): n = unknown
  misc_feature (203)..(203): n = unknown
  misc_feature (263)..(263): n = unknown
  misc_feature (276)..(276): n = unknown
  misc_feature (310)..(310): n = unknown
  misc_feature (311)..(311): n = unknown
  misc_feature (365)..(365): n = unknown
  misc_feature (368)..(368): n = unknown
  misc_feature (402)..(402): n = unknown
tttttcntttcttcaanaaanatnttttaaanaatatgggggttttgttttatggggggccttacatattaacttttgatagcaatataaagtantcnnanttatttcgnggatcctacccaattcctttattaaactggnatacttcttatactatcccattatttttattaaatatacacacaactttaaaaactnccttntggttttatacaaactttaaatatcactccttttttaccattaggatcgtaattaatttntacctaaattatntgacctggtaaatgtttacatacatttacctttnnggcatataaatttttttagtttaaataaatgctccagaaatattttttattctnttntacatatcaacttaattcctagtttttcaaaatnaatattacacagt

SEQ ID NO: 1124 - DNA, 382 bp, Ctenocephalides felis
  misc_feature (17)..(17): n = unknown
  misc_feature (26)..(26): n = unknown
  misc_feature (34)..(34): n = unknown
  misc_feature (41)..(41): n = unknown
  misc_feature (53)..(53): n = unknown
  misc_feature (61)..(61): n = unknown
  misc_feature (95)..(95): n = unknown
  misc_feature (102)..(102): n = unknown
  misc_feature (296)..(296): n = unknown
  misc_feature (321)..(321): n = unknown
ttttttttttttttggntttttgganggctgggnaaaaccnttatttatgggngcataganagaaggtggtgccaaaattaaaaaaccattgganatttaantttttttctatattcacattttcattatatttctaaactaatatccccaaatttcaactaagaaattaaatcctttgccagtctgagaagataggagtaaagttacatttttccagccaactccccattgacaagagtggcatagcctccttggccatttacatattggccagggcacgaacacagctaattgngcgattatttctcgatcccactggnggaaatgacacctctctagtagctttccgaaaaagtttccactcttggattggcttgacgg

SEQ ID NO: 1125 - DNA, 500 bp, Ctenocephalides felis
  misc_feature (28)..(28): n = unknown
  misc_feature (73)..(73): n = unknown
  misc_feature (103)..(103): n = unknown
  misc_feature (133)..(133): n = unknown
  misc_feature (176)..(176): n = unknown
  misc_feature (233)..(233): n = unknown
  misc_feature (245)..(245): n = unknown
  misc_feature (460)..(460): n = unknown
  misc_feature (480)..(480): n = unknown
  misc_feature (489)..(489): n = unknown
ggcgggggctctggaggacccaaaaccnttttccttttttaggggttcatccttcttgggggctggttttggncgggggatttttccgccttggccggcgggnttttgcgaattgggaatcgttgggtgaagnctggagtaccgaagggaacagccccaccacctcgtctggttgntgggaaatggatcttgatcctggatctttcgctgaaagaattggggtctattatggncttattcggtancccatctacctctacacccaaataaaacaaaattatttatgggatttcaaagaatacaacaagtcgccctggctcccaaatccccttaatatatatgcaagcagtgcagtctgtctattatttttgccactcacacttaaaaatataatggctggcccgtattttatattatattggttattccagaaagcactgttgtattgaaaaagatctgnaatcaacacatctcatgtanggtactttntttgaaaaggt

SEQ ID NO: 1126 - DNA, 301 bp, Ctenocephalides felis
tgtgaaccggcaaacattgtcagtaaagctgcactcatgaatttgaggtattgaccccaggatactccggcaggcattgtaatagttatagttttaaatttggattgtcgagggcaagtttttcctcaactatggttttggcttggcgacgcttgtaaactttatagaagttcgtttccccgacttgccactttatcatagagaattctagcgcagcacccaatacaaagaatattggtaaaaaactatagaatccaaatttacgtcgtcctggccacttactcaaaaaagagcgtaatgt

SEQ ID NO: 1127 - DNA, 500 bp, Ctenocephalides felis
  misc_feature (47)..(47): n = unknown
  misc_feature (60)..(60): n = unknown
  misc_feature (68)..(68): n = unknown
  misc_feature (73)..(73): n = unknown
  misc_feature (95)..(95): n = unknown
  misc_feature (140)..(140): n = unknown
  misc_feature (160)..(160): n = unknown
  misc_feature (409)..(409): n = unknown
cgagaaaaaaacttttcttggccccgatttaacccctggcgcctcanacccctggagaanctggtggntcaantcttttaaagaaaaaaaattgncaaaaactgggttgactggcgttgaaactggtaaaaacaacgacnaattaaatataaaaaattgngagaagaagcatatcgaagaggaaaatgaaagggacgatgccccattgatatctgtgcaaaggacgtgctggaagaaagttataagcctaatggacctggatcttctcaaggatttgacttttcttaacatagtggtcggagtcgcattacctatccgccagtatcaatttcagcatgttatttccattttttttgcaagaatcaactggactaaaccgagctgatacagcgatgtgcatgtcagtctngctggggcgggcattggttctcggtaactcttccacaattacacaaatctgggatttcttgcagatggctacctatcggactgccgtctaa

SEQ ID NO: 1128 - DNA, 500 bp, Ctenocephalides felis
  misc_feature (15)..(15): n = unknown
  misc_feature (352)..(352): n = unknown
  misc_feature (453)..(453): n = unknown
  misc_feature (461)..(461): n = unknown
ttctcaataattaanacttcatggttttattttttaatatgatgaagactgcagacgactatcacattttaattcacaatagtgaaaaaaaaatacgactcacaattatatgtatctttaacactagttgatgtaaaaaaaagatcacataatttatatttctggaaatgcaacttgcataacataaggccacaatttcatatgaaattgaaagtaaaaaatacttaacagttgaaaacaactaaataatgaacatgaacaataggaactatattcgacaacaaaaaatattctcaacaattatttcaaatttctaaacagcaaaattactaggcaaattacaaaaattggntccattacatattggatttaagtaattaagactaccgctgcatctgccgatggtttctttcttgcatgccataagttttcttgaggcagcattagcattgntttaaggncttggtacactttgcctaagggggaaggtcttgggcctt

SEQ ID NO: 1129 - DNA, 500 bp, Ctenocephalides felis
  misc_feature (3)..(3): n = unknown
  misc_feature (8)..(8): n = unknown
  misc_feature (10)..(10): n = unknown
  misc_feature (25)..(25): n = unknown
  misc_feature (47)..(47): n = unknown
  misc_feature (61)..(61): n = unknown
  misc_feature (98)..(98): n = unknown
  misc_feature (108)..(108): n = unknown
  misc_feature (195)..(195): n = unknown
  misc_feature (207)..(207): n = unknown
  misc_feature (381)..(381): n = unknown
  misc_feature (396)..(396): n = unknown
  misc_feature (465)..(465): n = unknown
  misc_feature (484)..(484): n = unknown
  misc_feature (493)..(493): n = unknown
aantaaancncctttggaaaataantgaaaactctttggcagccccngcaaggtccaattncggtgggtgcttaagggcttgggaatcaaaaattggncccaaaagantttacttcttgaaccccgaaatgggaaaaagaacaccaaagaacctttcacctttggaaatgggcaaaagaaagggattatttgggncccgggtggtanggtggtccaaccccttgacatggggaaactgggtgaaacgtgaaaatggtcatgggatttggcttgatccatatgcctaaagaaccatttgggcattttaagatatcaaatgccccacgctttgttgttacttgggcaaaaccaaatcaacccaaagggagggtatttcacggnccgtgtcttcttgcnacttggacgtggtggttttcaccggctttggagaacttcatcaattgaaacttactacatgagcatgantgggacaacaccttggatnggggtgggnaaacttt

SEQ ID NO: 1130 - DNA, 121 bp, Ctenocephalides felis
  misc_feature (63)..(63): n = unknown
  misc_feature (106)..(110): n = unknown
  misc_feature (116)..(118): n = unknown
aacgcaatctaatgcctaagttctcaagtggcgcaaaaccacgtacattcttttttgtaagancacatgtatgttatattataaataaaagagggaaatctaaccnnnnnaaaatnnnaaa

SEQ ID NO: 1131 - DNA, 500 bp, Ctenocephalides felis
  misc_feature (9)..(9): n = unknown
  misc_feature (12)..(12): n = unknown
  misc_feature (18)..(18): n = unknown
  misc_feature (172)..(172): n = unknown
  misc_feature (201)..(201): n = unknown
  misc_feature (218)..(218): n = unknown
  misc_feature (336)..(336): n = unknown
  misc_feature (356)..(356): n = unknown
  misc_feature (402)..(402): n = unknown
  misc_feature (457)..(457): n = unknown
  misc_feature (460)..(460): n = unknown
  misc_feature (462)..(462): n = unknown
  misc_feature (472)..(472): n = unknown
  misc_feature (489)..(489): n = unknown
aattcaccnctntttaangggcctaataattatctccttttttagagcctggggataatttacctcttaattttggggcccctttagctttaattggctcaaagctcctgccatgtcagaaaatcttcctggttaaaaaaatatggaaactggtaattttatgtcgatttgnttggggtttggtatcatatattacacgtnaaacagacaaactctgngatattatgaaggggtatttttttataatatgcttagataaatctttattactcccattataaaagtttggttgttcaacaaaactttcaaaccagcttgccgcttttaggtttaccntttaaaaaaaatataccccntttattaatcactgggggtatttaactttaatggattattaatctncatatacatttttagactttgcttcactttagtaggggtttatccccttccatcnctntnttgcgggggntgaacttttatcatttnttccttcgggg

SEQ ID NO: 1132 - DNA, 129 bp, Ctenocephalides felis
  misc_feature (13)..(13): n = unknown
  misc_feature (28)..(28): n = unknown
  misc_feature (86)..(86): n = unknown
aatttggtttttnggagcctctttttanagcccatttccagaacattttttagtaacctggtgggaaaactgatcgacaccacttntgaatttggtaaaaaacatttggaaatccctcttacttccggg

SEQ ID NO: 1133 - DNA, 398 bp, Ctenocephalides felis
  misc_feature (91)..(91): n = unknown
  misc_feature (391)..(391): n = unknown
taatcttaaaccttaatattggtttattaccgaaaatttctcaaatataataaccattcaacttattaaccgtcacttattaaacttttgntcatcaattggaatgtctacagaacaccagcgtgttttataatgaatacaaaaacgcggaacagacaaaaataaatctaaattgcattattatgtttataatgtatcttagaacatcaaagatataaaacctttctaaatattaaattgaaaaaatatgaatagccatgatataagggtaaatagatgtccaaaaaaaacgtttcatttaagaaagtcatatgagtagattagattttaaatttgtgcacagaatttatgactcatgatctttttaatcgctattcataaaataaacggnaaaatgt

SEQ ID NO: 1134 - DNA, 327 bp, Ctenocephalides felis
  misc_feature (300)..(300): n = unknown
attgttctcttacaaatctaaaaattagaactaatctatgatataaataaaaaataggcagcatacttatacacaatgtatctaatacaatatgtattacttcacgattgttgtcatataaacttcaatacccagaattttttttgcagttgttcaaaattacaaattgtctgcacaatccatagatcggagtgttttcggaatggctcttttcccacttagattcctttacgtaaacacaacacaaagcgtgtggagcaaaagttttcgataatactgcattatattgaatatatctgntaatgttccaaatcatgtaggttgcag

SEQ ID NO: 1135 - DNA, 357 bp, Ctenocephalides felis
  misc_feature (259)..(259): n = unknown
  misc_feature (293)..(293): n = unknown
  misc_feature (312)..(312): n = unknown
  misc_feature (322)..(323): n = unknown
  misc_feature (326)..(327): n = unknown
  misc_feature (337)..(338): n = unknown
cacacagtcagtgatagagttacgcgttcgttccgcacttaaccttacgaatacttagattttctccaagaaaatcttttatctaagaagaaaccaaattcaagttgatgcattattctccggaattgttagagaatctgaacaacggttcgttgttcttcagctacgaatacaaccggcactgtaaagggtctttgaagaaactggctcgaaagctgctccacgttaggacggccgttctgaagattgggaacaagtnaagattaccaggaaaggggaacgatgatgaccangaacagaattttaccgatnttaccaacgnnttnngacatatgtnnacatattatacaaatatat

SEQ ID NO: 1136 - DNA, 500 bp, Ctenocephalides felis
  misc_feature (20)..(20): n = unknown
  misc_feature (165)..(165): n = unknown
  misc_feature (244)..(244): n = unknown
  misc_feature (372)..(372): n = unknown
ttttttttttttttttttgntttggaatacataatttggtttacatttattcttttataaaattacataaaatatctttaggaataacaaaaagggattttcatatgcacatgtgcatataaataccatgcatatatgtatatgcatgttaacagaaaaattggnaattagttaattagttcactgggacattattttttccccacgtttgaaagaggcacttcatttcctaaaaccggaaagngattttcaaatgagtgggcaacacatgatgctttaaatcggcacgcaaaagtcttgatgacatgtggcacacatctcaatcttgcatttgatttttcactttggataaaaatatagtataattcctgntgcttgcagatatcgggcagtaagcaagccactctgggaagatttcatcaaaatcttgcccaagctttatgccatgacataaatgatgcctgataaaatccttcctaatattggtcctcagaagctgc

SEQ ID NO: 1137 - DNA, 378 bp, Ctenocephalides felis
ttgaaatttataaatatatattttcataatctatcattttataattcttaaaattattgagctacattatcaaataatttctctgcaggtaacttccaatgttcaaacacataaggtaaacgatctttttgttcagtgctccaatgatgtattctgcatttaacatctactttttctttattattaattgttacaacaacattgaactctttattttgcaagttcatatccggacctttgataggctgttcgggtatttttattgcttctaatgggcactcaattccacctttacgcagagctatttgaatgtgccatggctcgataacccaaggctcttctttgttcattactacggcaaatacatgtttggagagt

SEQ ID NO: 1138 - DNA, 264 bp, Ctenocephalides felis; identical to SEQ ID NO: 207

SEQ ID NO: 1139 - DNA, 498 bp, Ctenocephalides felis
gtttttgttattttcggaaacttggattaataatgaagaacgaattaatattcagaactattactgcgttactcaatacaaacgatcggactcaagagcaggtggtgtagctgtctaatgtctattattcatgttcagatactcttcataatgcgactcctatgcagtttcttgcgccaacgatattactggatatttctaatgaaattacacaagtaggtgatattacacacacagaatcaaacattgattatagtcgtcctttacatttctcccaataaaaacatatcaaatattattaaatttcttcatcagcagttacttcatttttcttatgagggtgcaaaacttttaaacactaatcacaacgagataccattaattcttgctggagatttcaatgtcaattttcgttcagaagaatctcaaccattaattgattttttaaataataaatttaatttaacaatgaataattctccatttgaatcaaccaca

SEQ ID NO: 1140 - DNA, 498 bp, Ctenocephalides felis
  misc_feature (432)..(432): n = unknown
taccgtcggtgtttattgaatttttagttatttaatcagaagtaatttaagaaatatatacaaaaattgaattttatcagaaaacatataccatttcataacaagttttatcgcgttcgacaattttcatataatgaattaataaatattttcaaaatgacatcagaaatttttctcttatcacctgtcgatcgcaattaaaaaaacactgttagccataatattgcaacagaggaatttatccagcacatgcttatttataaagatcagcttatcaataacatgatatatgaaaatatacttacctaaatgataatctattgtttaaatgcatttttatatttcaaaattcttatttaatattttcgctttcgtatagcagataaaatcttctggaaatttgcaaaatggaatcgatcaaaaaatcgttgntttacagggaatgcacagcaattaatgccattattaatggaaatgatcctatttaagcaggaacac

SEQ ID NO: 1141 - DNA, 289 bp, Ctenocephalides felis
  misc_feature (5)..(5): n = unknown
catancaattatgaaatggattcatgatatatatatatatttatcttcaaaacatagacattcaaaactatttgttctcattaataagattacattcagtcaagaaaaacatgccaccgagttttagctttttcaacaaaatataatttttttttattgttaaaaaacaactgccatacaaatacaaattcaaacacattcattacaacattatgagaataagtttaggatttaaccagaaataaattaataatggcgaacaaatagtaataaataacttaaaatcagt

SEQ ID NO: 1142 - DNA, 484 bp, Ctenocephalides felis
  misc_feature (87)..(87): n = unknown
  misc_feature (101)..(101): n = unknown
  misc_feature (127)..(127): n = unknown
  misc_feature (207)..(207): n = unknown
  misc_feature (324)..(324): n = unknown
  misc_feature (326)..(326): n = unknown
  misc_feature (424)..(424): n = unknown
ttttttttttttttttttttcggtttacaaaatttatttattcgtcagaaaagaaatttataaatttacttttttgataaaatctgngtttgtaaaaaagngttagtgtatattcaatcatacaggnaattaattctgttttttttcagtaaccttttcttaaaactttctaaaacttttcaatttttaacattttcaatattttgntactcatttatttttatcatttcattttgattattggcatatttctatatattattttttcaacaatgttattaatttaaaaaatccatcatcttataattttcctaaacatattgntngcttaaatcttatcaaaatcatgtttcttgacagatgtcctgaagttggaacatacctagttccgaaacgcgataataaataaataaagaaatgggtnttgattattttattactttttggattctttggcgaagctcaacaatatatatatatatct

SEQ ID NO: 1143 - DNA, 498 bp, Ctenocephalides felis
  misc_feature (147)..(147): n = unknown
  misc_feature (271)..(271): n = unknown
  misc_feature (317)..(317): n = unknown
  misc_feature (326)..(326): n = unknown
aaaatattcgaaacatttacagttacttaagaataaatttacttatgagtaaacatagttcaaaatatttaatgttatttataattataaaataattgatttttagccaatcgtcgaaataaaaaaagacaaataaataaaaatatnctttataaaatacgttttgacacggattgtgtgtcatctatcagcaatttttgttaaatagtatctaaaataataattacaaagtttaaaaaataaatataaaattttatatttaaaataaggnatacataccacactagaaaaaaacattttttaacttcccgtaaggnagttatgtnatgaaccgaaaatcgaaaatgaaattttttgcatttctcgacgtcttgaaggtttctggacattttggcatacctcagaaaaaatggatgtgtgtgtgtgtgtgtgttttgtatgccgcatttttagtcaacgttttcgggcgcacagatcaaccgatttgaatgggttaaa

SEQ ID NO: 1144 - DNA, 500 bp, Ctenocephalides felis
  misc_feature (5)..(5): n = unknown
  misc_feature (8)..(10): n = unknown
  misc_feature (16)..(16): n = unknown
  misc_feature (20)..(21): n = unknown
  misc_feature (27)..(27): n = unknown
  misc_feature (29)..(31): n = unknown
  misc_feature (45)..(45): n = unknown
  misc_feature (60)..(61): n = unknown
  misc_feature (86)..(86): n = unknown
  misc_feature (110)..(110): n = unknown
  misc_feature (115)..(115): n = unknown
  misc_feature (120)..(120): n = unknown
ttttnttnnntttttntttnnttttgnannnttaaccacgccatntcggcaagccatggnntacagcaaatgagtaaacacacagncaaggcatggaaacatattatgtngctgngtgtngcatctcgaataaacccaacgattggacccaaagccaatgtcattattccttgcaagaacatgaacagcccgtatgccgaaggaaatctctcctgtgaaaaatattcggcaaatactaaaggtaaaggcacatgaatccatgtgcggaagaatcccaaaaaacttgatattataagcatcattgtaaagtcagtcacgtacaagaacactatacgtgcgaaaactgagaataaagctcccgctaaaaatactgttctactgctgactttaacacaagcagtcattcctgccaaaaacatccttgatgacaaatctgcagctgctgcagcagacacacaaattgctgtatcagttttgccagcctaatgcaaacagataca

SEQ ID NO: 1145 - DNA, 280 bp, Ctenocephalides felis
  misc_feature (10)..(10): n = unknown
  misc_feature (22)..(22): n = unknown
  misc_feature (27)..(27): n = unknown
  misc_feature (62)..(62): n = unknown
gtttaagccnttaggtttaagnccctngttagcgcggtcgcgggccggggtacatttaatgntacaccttgagggaatgacgcttgcaacagccttagaagcacccggatattttgtagaaggtaaatcacaaatctgaacatttctttcatagacgcaaagctggtattcggtttcaatagccgaactctttggttttaatttttgaatcttaaagtattgcccaggcgtagcccacccatcattaatatctaattctaatgattttgcaatacgatgt

SEQ ID NO: 1146 - DNA, 287 bp, Ctenocephalides felis
  misc_feature (108)..(108): n = unknown
  misc_feature (117)..(117): n = unknown
  misc_feature (182)..(182): n = unknown
  misc_feature (191)..(191): n = unknown
  misc_feature (217)..(217): n = unknown
  misc_feature (226)..(226): n = unknown
  misc_feature (234)..(234): n = unknown
tttcactggcctaccaaatttactacgccacctagtggcggccaattgtccttcatattcctctttgatggtttttgactcaaattcttgcaaagcacacatcaaagnttttctttnatcggatgttagtctcaaggggagctcgattgcttgttccttacttatttttccatttgaagggnatgatgagngattaacaagactgggaggtattcgnctctcacantttggtgntataatagcagcatgtaaaaatttggaacgactgtgctgggaaagaacacaat

SEQ ID NO: 1147 - DNA, 484 bp, Ctenocephalides felis
  misc_feature (199)..(199): n = unknown
  misc_feature (439)..(440): n = unknown
  misc_feature (448)..(448): n = unknown
ttgctagttgaccatccatcagcattattgagattgttttgaaaaaaaaaaaaaagtcaatttaggttaatttataatttttgctctttaacaaattgtttatttatattgtagtatttgttttaaatataacttgtgccagattcttcttttctaaaacgaattgatataattttatagatatatttagaaatattgnttttgggcatggagggtaaaagtaattgcgtttgaatggaaaaaatgggtctttgtatatatggaacttgatttttatgttttgtgaccctaaaaagaaatcttcctgagagaatcaatttcttctttgctccacaaatgtaacacacatcacacagggtctgtacaaacatcgggaaatatatgactatatatatttctatcattttcatactttttatactaaacatttatatttggnnaagaatgnatgatttattattatataaatgctaaaatatttatg

SEQ ID NO: 1148 - DNA, 498 bp, Ctenocephalides felis; identical to SEQ ID NO: 520

SEQ ID NO: 1149 - DNA, 306 bp, Ctenocephalides felis
taaaattgttgagcataaaatacttccaaagtctactctccaatgtaatctacaggatcaacattcatttataaagatttaatgtttcgagtgcttcgtataatagaacacctataaaaacttttttttgatattcgtgttgatactatataaatttttaaaatcttattttattaattcactcatacttttagcacagatttaatactgcaaaaatttcaatacaaatttattatatacagatacaacaatccagcttgtcactactctcactctaaataactacatgactatcaacctctctgt

SEQ ID NO: 1150 - DNA, 500 bp, Ctenocephalides felis
  misc_feature (54)..(54): n = unknown
  misc_feature (157)..(157): n = unknown
  misc_feature (215)..(215): n = unknown
  misc_feature (243)..(243): n = unknown
  misc_feature (250)..(250): n = unknown
  misc_feature (291)..(291): n = unknown
  misc_feature (295)..(295): n = unknown
  misc_feature (310)..(310): n = unknown
  misc_feature (313)..(313): n = unknown
  misc_feature (322)..(322): n = unknown
  misc_feature (329)..(329): n = unknown
  misc_feature (335)..(335): n = unknown
  misc_feature (354)..(354): n = unknown
  misc_feature (369)..(369): n = unknown
  misc_feature (381)..(381): n = unknown
  misc_feature (390)..(390): n = unknown
  misc_feature (401)..(401): n = unknown
  misc_feature (411)..(411): n = unknown
  misc_feature (417)..(417): n = unknown
  misc_feature (425)..(425): n = unknown
  misc_feature (430)..(430): n = unknown
  misc_feature (439)..(439): n = unknown
  misc_feature (461)..(461): n = unknown
  misc_feature (463)..(463): n = unknown
  misc_feature (471)..(471): n = unknown
  misc_feature (478)..(478): n = unknown
  misc_feature (480)..(481): n = unknown
  misc_feature (483)..(483): n = unknown
ctcaattaaaacaaattttgtgctcataactaaagatttttctggagttgcggnccattagctcatagaaataaattattgacagcaattttgttcaattatatgtcaaaaaaattatgtttctatctaatcattattgaatgttaatgtaaatggnttaattttttaatgcatgaatatttccaataaaacatatttttgaatgtgaagatagnttatggcatataaattggaccattattnctatggncaatatttgaaaatattaaaataattttaatgcttattatnctgnaaactattaagaacnttnctgggcccngaatatncttttnaaaaacatttggttattcnaaattattaagaatnaaaacgtgttgntttcagacntgaaaggtacnatttctaacntctggnttggcacngaacnataatttgnttaaggcccacatttaaaatcntnacaaaacntctcacncnnanttttttattattcatca

SEQ ID NO: 1151 - DNA, 349 bp, Ctenocephalides felis
agaaacagatagtagtcaaatgagtttccccctgcaatagtcgccagaacgaggggaaatatatgcttagctattaaaatattcattataattaaaagggtttgttaactttattttaagagttaaattagaagtggcttcagaccttcgtaattttataaacactatgatctgtaagcataaatcagtagtaaatggtttactaaacttcctaaatgcacaaacaattgctcaaaaatatcattgttaaagcattgaactatgtctaaaatattgcaaaagaaattaacatattttaaatattactaagaacaccatgtattctgcatcagatgtttatcttttttgt

SEQ ID NO: 1152 - DNA, 396 bp, Ctenocephalides felis; identical to SEQ ID NO: 387
  misc_feature (387)..(388): n = unknown

SEQ ID NO: 1153 - DNA, 500 bp, Ctenocephalides felis
  misc_feature (2)..(2): n = unknown
  misc_feature (33)..(33): n = unknown
  misc_feature (62)..(63): n = unknown
  misc_feature (66)..(66): n = unknown
  misc_feature (68)..(68): n = unknown
  misc_feature (73)..(73): n = unknown
  misc_feature (102)..(102): n = unknown
  misc_feature (134)..(134): n = unknown
  misc_feature (138)..(138): n = unknown
  misc_feature (146)..(146): n = unknown
  misc_feature (194)..(194): n = unknown
  misc_feature (215)..(215): n = unknown
  misc_feature (225)..(225): n = unknown
  misc_feature (231)..(231): n = unknown
  misc_feature (255)..(255): n = unknown
  misc_feature (278)..(278): n = unknown
  misc_feature (283)..(283): n = unknown
  misc_feature (302)..(302): n = unknown
  misc_feature (313)..(313): n = unknown
  misc_feature (318)..(318): n = unknown
  misc_feature (346)..(346): n = unknown
  misc_feature (356)..(356): n = unknown
  misc_feature (393)..(393): n = unknown
  misc_feature (424)..(424): n = unknown
  misc_feature (448)..(448): n = unknown
  misc_feature (463)..(463): n = unknown
tnttttttttttttttttttttttttcaagcangtcatcaaaaaattttattaaatttcggnnatngncatantaaatatgtaatatcacctcaatttcagntataaaaataatagccaactgttatcattcanaagnattatttngccttctgactcctttaaatcttgttcttgacttaaacgttgttctgnagcccgttcccatgcatattnaaatggaaanactaangggttattttcctctgggccgttngcgccatctcgaccttatgggcnggagntcccttcatatgcaatcgntctaatatggnggggnatgaacaacggaatcaaaagaagttatntacgagaatntttccttatcagatttcacatccgggcgcccttttgntgaaaaaagaacttatgtttgccaatctctnttaaaaactcaaagcacttggatnttctgggccgattgntgggcacatctattaaccaacatttatttttgtcctc

SEQ ID NO: 1154 - DNA, 314 bp, Ctenocephalides felis
  misc_feature (55)..(56): n = unknown
  misc_feature (86)..(86): n = unknown
  misc_feature (224)..(224): n = unknown
  misc_feature (235)..(235): n = unknown
  misc_feature (287)..(287): n = unknown
aaatatttggtttctgtttataaaagactaatacaaaccatttaatcattcattnnaaaataaaacattcataatatttaagttgncaggtgaaaactaattgcataattatttaactaaattattgactgttttatttttcgtttgattttgtgctgaaatgatgcaaaaagaataattttgagcaaaacctacctctttttaatttggaaactatagagggnattattaatgnttccaattccatagaatgtatatttgtagattagtaaaggtaattaatgccnaaaaaaaaaaaaaaaaaaaaaaaaaaa

SEQ ID NO: 1155 - DNA, 352 bp, Ctenocephalides felis
atggctacattaaaaatcaaacgattcaatgttttttatgaattgagaaaacaatttatataaaaacgattaactttcattcagaagtttttgttaatataacaatagtatctgaaaaatattaaaaacatctgtcaaaaatatgcaaagtaatttcattcaattataaaaagatttttcaataatttacaaaaattaaaaacatttttgaaaagatatcaatatcagcacatgttaaatagtaagagacaagaaacatgacctttaaaatttaatccgtgttgcatatacaacaatgtattttaaactgtgattttggcaaccatcacttcatttattgcatacgtaatgt

SEQ ID NO: 1156 - DNA, 500 bp, Ctenocephalides felis
  misc_feature (4)..(4): n = unknown
  misc_feature (6)..(6): n = unknown
  misc_feature (18)..(18): n = unknown
  misc_feature (21)..(21): n = unknown
  misc_feature (28)..(30): n = unknown
  misc_feature (37)..(37): n = unknown
  misc_feature (54)..(54): n = unknown
  misc_feature (87)..(87): n = unknown
  misc_feature (97)..(97): n = unknown
  misc_feature (128)..(128): n = unknown
ctantnagccccttactnacncttggannnccgcggncgtccggcggtcctggncaaattggagttattcgatgtcttatgtagagnattttgaagngggtaaataaataatacatcggctcgcgagnttgttaaagtttgattaaataacttagtgatcattttcaagttattgaattacaacactttgaaagcattaagtgcctttgttagattttaacaatatcaacataataaataattatattaaaaaatttattttaattcactcattttaaacaaaataaatttcatatacaatatttaataaatcctgacaaaattgtatttaatttacttgatattttaaataataaatgttttagttagaatattaaggaaacgtatacattaaaataaaatgatatgttcttcacctttatcttttcaataatacgaaattcgaattagtatggcttccgcttaaattaaatatgtttgctaaactgccaatcaagaaa

SEQ ID NO: 1157 - DNA, 92 bp, Ctenocephalides felis
  misc_feature (60)..(60): n = unknown
  misc_feature (70)..(70): n = unknown
caaacgaattacaacaagtggaaaccactgtaataacaaacgaaaagtgctacgaattgnctcaattcgntgaaccaacttcgcaaatatgt

SEQ ID NO: 1158 - DNA, 495 bp, Ctenocephalides felis
  misc_feature (17)..(17): n = unknown
  misc_feature (41)..(41): n = unknown
  misc_feature (48)..(48): n = unknown
  misc_feature (51)..(51): n = unknown
  misc_feature (61)..(61): n = unknown
  misc_feature (64)..(64): n = unknown
  misc_feature (69)..(69): n = unknown
  misc_feature (74)..(74): n = unknown
  misc_feature (83)..(83): n = unknown
  misc_feature (85)..(85): n = unknown
  misc_feature (108)..(108): n = unknown
  misc_feature (110)..(110): n = unknown
  misc_feature (121)..(121): n = unknown
  misc_feature (127)..(127): n = unknown
  misc_feature (129)..(129): n = unknown
  misc_feature (132)..(132): n = unknown
  misc_feature (167)..(167): n = unknown
  misc_feature (182)..(182): n = unknown
  misc_feature (203)..(203): n = unknown
  misc_feature (251)..(251): n = unknown
  misc_feature (260)..(260): n = unknown
  misc_feature (275)..(275): n = unknown
  misc_feature (294)..(294): n = unknown
  misc_feature (296)..(296): n = unknown
  misc_feature (320)..(320): n = unknown
  misc_feature (329)..(329): n = unknown
  misc_feature (352)..(352): n = unknown
  misc_feature (395)..(395): n = unknown
  misc_feature (451)..(451): n = unknown
  misc_feature (472)..(472): n = unknown
  misc_feature (486)..(486): n = unknown
  misc_feature (495)..(495): n = unknown
ttttttttttttttttntttttcaagggaaaagactttatnaaaatanggngattttatantcngtatncaacnctgattacnantgttccattacttttataaaatntnagaaacaattnacgctngnatnaacaatttaacttcaactttgggagcagtttcaanagcagccaacaaatngtctacattacagcaatatgngtatcctctagttaaattagcaaaataggaatcttcaaatccagcttntttgcagangtccttgcagagtanatctttatgaggaactttntntgcataaggattattgagggtaanaaaagcaangccttctccagtttttggcgatngtactattttccaattccatttgggtatccaaatgtttccgtntttggcaataaacatttttacttcgttgttattgcatcaggcagagttaggatatnatggacacctgaatagacggncaaatcttcagctntggaagaan

SEQ ID NO: 1159 - DNA, 148 bp, Ctenocephalides felis
atgaaattatgtgttttgaaatttttccgattttgtaaataagacatgcttttgttttgatattttaaatgtgttcattgggattactggctttttttacaaactcatatgcttgatacgcatatacatacacataatttgcacatgt

SEQ ID NO: 1160 - DNA, 339 bp, Ctenocephalides felis
cattctagagtatttggggaaagaagattgttcgataaatcaacaattttagacaaacgagaaattaagtaatattataaaaatagatatcaatctttcatcttactaatttgatattgataaaaaacgaagcaatacatagggtgtgtggttgaggcgtttctttttttgttttatagtagatgaattctaaaacatccagaaaaataatatatataaatcagttaaaaaaatgttttttttcgcctattcagtatcacaatatcccaacaatgcaatatatggttggcacccattcaaaactaaagtatgacaagacgcatagccaattgaaaatgt

SEQ ID NO: 1161 - DNA, 212 bp, Ctenocephalides felis
aagctctttacaccatcatcaacttttgttttgcagatgtaatagaaatgatcatctcctggccatgggccgttttctccagctctttggcagtctactgcgagattcttgcaaatctcggaatccaagcttgaagtgcacgtaccagttacgacatcgaatgcatttttaccaacgcattcttttaatattccatcagctcctttttcagt

SEQ ID NO: 1162 - DNA, 498 bp, Ctenocephalides felis
  misc_feature (178)..(178): n = unknown
  misc_feature (194)..(194): n = unknown
  misc_feature (212)..(212): n = unknown
  misc_feature (214)..(214): n = unknown
  misc_feature (223)..(223): n = unknown
  misc_feature (246)..(246): n = unknown
  misc_feature (255)..(255): n = unknown
  misc_feature (265)..(265): n = unknown
  misc_feature (299)..(299): n = unknown
  misc_feature (304)..(304): n = unknown
  misc_feature (324)..(324): n = unknown
  misc_feature (356)..(356): n = unknown
  misc_feature (372)..(372): n = unknown
  misc_feature (377)..(377): n = unknown
  misc_feature (384)..(384): n = unknown
  misc_feature (398)..(398): n = unknown
  misc_feature (406)..(406): n = unknown
  misc_feature (419)..(419): n = unknown
  misc_feature (425)..(425): n = unknown
  misc_feature (454)..(454): n = unknown
  misc_feature (458)..(458): n = unknown
  misc_feature (474)..(475): n = unknown
  misc_feature (490)..(490): n = unknown
ttaaaacaaagaaaattagttcaaatatttttcaattcttagtttgtgtgtgcatatattgattatttagaaatctttataaacaataggacacttacatttcaaaaataggtgttaccgaataaattatgatctctttcactacatatattacaatcaacatttattaaataagtgntgaatttatttattgngcaaataataatatgctntncatgtttgnaatcaatttattaatttaattgnataatttgntggtttaccncacattttagctactggtgagctaggcataatgngaaanggatatcttaatttttttgngatcaaagctttcattttattaaaaaaggaanttattaataaatatgngccanttttcantattgggatgctanttatgccnatgatatggtggnatcatnatatttgaataatcgattttttgatcctnttgngcgatatttaccaacnntaatgttttaagctntaaagaat

SEQ ID NO: 1163 - DNA, 360 bp, Ctenocephalides felis
  misc_feature (4)..(4): n = unknown
  misc_feature (15)..(15): n = unknown
  misc_feature (20)..(20): n = unknown
  misc_feature (26)..(26): n = unknown
  misc_feature (28)..(28): n = unknown
  misc_feature (40)..(41): n = unknown
  misc_feature (61)..(61): n = unknown
  misc_feature (92)..(92): n = unknown
  misc_feature (94)..(94): n = unknown
  misc_feature (146)..(146): n = unknown
  misc_feature (149)..(149): n = unknown
  misc_feature (154)..(154): n = unknown
  misc_feature (158)..(158): n = unknown
  misc_feature (162)..(162): n = unknown
  misc_feature (168)..(168): n = unknown
  misc_feature (183)..(183): n = unknown
  misc_feature (186)..(186): n = unknown
  misc_feature (195)..(195): n = unknown
  misc_feature (207)..(207): n = unknown
  misc_feature (252)..(252): n = unknown
  misc_feature (281)..(281): n = unknown
  misc_feature (302)..(302): n = unknown
  misc_feature (315)..(316): n = unknown
  misc_feature (331)..(331): n = unknown
  misc_feature (345)..(345): n = unknown
  misc_feature (352)..(352): n = unknown
  misc_feature (354)..(354): n = unknown
tccnaagcccttgtnggctncatttngnttaacgggggcnncggcgggggactaaaattgntgagcataaaatacttccaaaggctactctncnatggaatctacaggatcaacattcatttataaagatttaatggttcgagggnttngtatnatanaacncctatnaaaacttttttttgntantcggggtgntactatataaanttttaaaaacttattttattaattcactcatacttttagcaccanaatttaatactgcgaaaatttcaatacanatttattttatacagatacancaatccagcttgnngctactctcactctnaataactacatgantattaancnctctgt

SEQ ID NO: 1164 - DNA, 500 bp, Ctenocephalides felis
cgagtatgaatatgattcaaagggaatcaaaaataacaaagataaagtttcattaaaagaagctattttactcatggagaaaatgcaaaataaaatggatgattccagcactgtgctcagcgatctggacgatgatcttttggaagctgaaattttgcagtctgcaaatgcaggaagtcatgaaagcattttcaaaggtcgctatcactacgtgtggcctatgttgcttctccttttaattgttcttaccgttttgtttgtcgttggaaaaatagttcacatttgcaccgataaccgacaacgttcactcaaatatcagaatataataactgctgtgaatcacaagattgtaaagaagaaggattgtggattagtatatcaacctctatcagaagaaatcagatgtccccaacgccaatagtgacacgctatcaagctatttgagcagccgtttcatcatgaaaaaatacccccgacaagtgtactttaaacgttaattc

SEQ ID NO: 1165 - DNA, 495 bp, Ctenocephalides felis
  misc_feature (10)..(10): n = unknown
  misc_feature (13)..(13): n = unknown
  misc_feature (20)..(20): n = unknown
  misc_feature (51)..(52): n = unknown
  misc_feature (144)..(144): n = unknown
  misc_feature (202)..(202): n = unknown
  misc_feature (218)..(218): n = unknown
  misc_feature (236)..(236): n = unknown
  misc_feature (348)..(349): n = unknown
  misc_feature (378)..(379): n = unknown
  misc_feature (391)..(391): n = unknown
  misc_feature (415)..(415): n = unknown
  misc_feature (425)..(425): n = unknown
  misc_feature (454)..(454): n = unknown
  misc_feature (463)..(463): n = unknown
tttttttttnctnttttttngatgaattaacattagtcaatttttttattnnaaaaaatataatatgagatttccgattacaaattatttttgttttttctttgatgttgatggtttattggctttaaatttagatattattgnagttatcaaaacaagactgaatcctatagttgtaaatgcgataacaccaaatattacnatagatcaacgatggngtattcatttatgagtgnggtaaatttatcaacagcatcacgaatcatttccactacccaggaaactagatcatcaaatggtgcttttggtagtggcacaggttcagctttagtatttttgtcaagcccnntttttttttttttttttttttttgcttgnngggttattagantatggatttgtcatctataaaacnaatagttaanaaaaattttttaaggtcaatttccacgangcaattttncacaacatcattaatttttccaatctggattc

SEQ ID NO: 1166 - DNA, 419 bp, Ctenocephalides felis
  misc_feature (190)..(190): n = unknown
  misc_feature (319)..(319): n = unknown
  misc_feature (392)..(392): n = unknown
cagcaccattagcacaaacagacaaccggcatgagttatccaatcgcttgcgattctatgctctggtaaaaaatataagtcgagaagttgccatatgcttctccaaacattgacagttccaatgaaactaaaaaatagaaataagtcagcaactaaaactctccaaaatccttccaaacgagcacatgtncatcgcatgataggctgaagactgaatgtgagtattacaatcccgtagccaagtgcaagtgaagccagagcactaagcgatggatcatctggaaatataatattgtccaatatcacccaagctcccctncacacgacaaccaccaaggatccaacgatgaatacggaaaataagcaatcgattaccgtaaagccatttcttntgatgctcgattctttaaaatatgtag

SEQ ID NO: 1167 - DNA, 293 bp, Ctenocephalides felis
  misc_feature (45)..(45): n = unknown
  misc_feature (168)..(168): n = unknown
tagcccttcaatcattatttttatttaataattgggcagatttgntagaacaaaaataatgattgttagggctataaaatctgcacaattattaaataaaaaaatattgggaaaattttctatatcatgggcaatttattacagaagagcgaagttaagcatgagggntttatcaattattggtctataaattataatagaaatgaaaaaaattgttagatataaagaaatgtttactgtaagattttagcaagtgttgagttgaaaatgaagaatatgcttacaaaattggt

SEQ ID NO: 1168 - DNA, 109 bp, Ctenocephalides felis
  misc_feature (33)..(34): n = unknown
  misc_feature (85)..(85): n = unknown
caatcaagacctttggaaagatttttggggcannttaggttggcccaaatccaagaggaaattcaacgttggccaagcgcctttncctacatcagcgggcaaatctggt

SEQ ID NO: 1169 - DNA, 438 bp, Ctenocephalides felis
  misc_feature (436)..(436): n = unknown
tgagaataaagctcccgctaaaaatactgttctactgctgactttaacacaagcagtcattcctgccaaaaacatccttgatgacaaatctgcagcagctgcggcagatacacaaattgctgtatcagtctttgaccagcctaatgcaaacagatacattgtttgaatagcagaaaaatgctatgtcggagtatagtgcaaatgtcactccaataaccatatttacataaatccagtcttttaacaaagtcaaatccaaaaagtcaacgataacttgcaattttcccctggatttcttctctaccggtgcagtagtgctatcactgacaatgactgctccagtccaattacctaaactagaaatggaagatccacgtcttctcattctatgttcttcatattgaagcatcttaactggagttacgccttctatatncc

SEQ ID NO: 1170 - DNA, 500 bp, Ctenocephalides felis
  misc_feature (13)..(13): n = unknown
ttttttataaatngtttaaaaattacatattattgaacaaaaaataaactgtagtaaattaaaaacaagatccaaatttccaaagcaatttgttaatcaataactgagaaacgactcgtcgattattgacaaaatttaatcagcacgattttcaaatagaaaacttttttaatggtttttgaattttcaaaatcgattcacaaatgtaagctataacgtgaacaaaaaatttgagatttttttgaaaattctaaagaaacggctcggccgatcatgaggcaaaactaaccagcacgagtgcttatcgaatttgcgaatttcaacgacttttcagataggattttgcattattaagaaaacgtcgactaaagatgaaatttagactcacgtaaaaaagtgctgctcatttttttggaaatttttatatttttctgttgattagaaacagcttggccgtcgcgcacaaaactaaaagacgctagtaattatctagtacatca

SEQ ID NO: 1171 - DNA, 220 bp, Ctenocephalides felis
tctcaaggtctggtgagacgttccacaaaaattctagaaatcagaacaatgcttccaaaatacaaatacacgtcctacaatatcaccattcaacacctccaacaattttactatatcatttactcctcaaaattcgtcctagtaggcttataaacaccgacatccttgtcctccgaatggtagcccaaggaggccaattcgtccataacctcaacattgt

SEQ ID NO: 1172 - DNA, 284 bp, Ctenocephalides felis
  misc_feature (47)..(47): n = unknown
aataattttaactatgtcttattatatccctttgtgcatataggggntaaactgactaacaagtatcacttttttttataaatatccaagtatcatacgacacacgtttataacgatttcataaattaaatatcactgtttgtttttgtacaaaggcactttttgtcttcaagcacacaccgaggctttaaactaccaatgtaatatttgactagaataattttaattgtttcagcgtccactgaaggctttaagcaacttcgtgccaaacagactctctgtcg

SEQ ID NO: 1173 - DNA, 500 bp, Ctenocephalides felis
ctaagatgtatatattctacacatatgtgcatataatattgtcaagtaatgtcatgtgatatatctccaaaaggcgtaaacgctggaagaaaactgagtaaactagaaaaccattgatgtgtggaagatctagtccaagaagcttttttatggtataaaatggaaacaaaaatgtaaaaatatagttgcaattataataatcatatcattagatatgtagcgaatatgagatagattctttttaaaacttttataaatttatttatatataaaaattctcaatataaatagtatactcaaatatatttatatgatttaataatattgaagtttttataaccaatatttttcagtaaaattttcagtaaatgatgattttttttataaaagtgcgtattaattaaaataatataaaaaaaaaagattttaaataatcaatatactattaaatatatgatcatttttatgaagtattaattttcttataaattattagataa

SEQ ID NO: 1174 - DNA, 353 bp, Ctenocephalides felis
  misc_feature (21)..(21): n = unknown
  misc_feature (48)..(48): n = unknown
  misc_feature (50)..(50): n = unknown
  misc_feature (52)..(52): n = unknown
  misc_feature (58)..(58): n = unknown
  misc_feature (65)..(65): n = unknown
  misc_feature (74)..(74): n = unknown
  misc_feature (126)..(126): n = unknown
  misc_feature (137)..(137): n = unknown
  misc_feature (147)..(147): n = unknown
  misc_feature (150)..(150): n = unknown
  misc_feature (188)..(188): n = unknown
  misc_feature (197)..(197): n = unknown
  misc_feature (234)..(234): n = unknown
  misc_feature (288)..(288): n = unknown
  misc_feature (335)..(336): n = unknown
cttcattttttcaatatgcanttcgattttaatctaagggaaaaaatntncnggtgtnggttaanatttaattnggaataaaattctgtgtattatatttagttttttttaaattatcatttaatnttaattattgntaaaaatatnatncgattaattaaaataatattaaacataaatttcattgntttttttangaaactaaattgggaacctttttatatcttattatcnacgctaaaaaaaatacattttttttagtattttaccgtttcatattatattaanaaaaacttttagttaatactaattattataaaaataactaaaagttnnacaaaaatactggaagt

SEQ ID NO: 1175 - DNA, 500 bp, Ctenocephalides felis
  misc_feature (6)..(6): n = unknown
  misc_feature (8)..(9): n = unknown
  misc_feature (105)..(105): n = unknown
  misc_feature (146)..(146): n = unknown
  misc_feature (169)..(169): n = unknown
  misc_feature (231)..(231): n = unknown
  misc_feature (233)..(233): n = unknown
  misc_feature (348)..(348): n = unknown
  misc_feature (460)..(460): n = unknown
  misc_feature (488)..(488): n = unknown
tttgtnannaaagatacaggctgtttgtttatattgcataggtatacaagtgaagcaatattttgaacattgaaaaaatcacaaattgggtatataatttacagnaaaaatacaatatagttcagaattcataaattaatattttntacaagaaacaattactttaggngcttaataataagtttcttaatgaggcatgaagatataaaattaaataaaaatgatcatagngnaaaatacaaattaaatagttcacacaaataaatagttagcaaagtcatctacgctatatatacccttaatactcgtatattcttctagtagtaattttttcactaatttcacagncttcaagattattccaaaagatttacgacgaaccatctgatgtgagcgaatttgatgtagagctcagtcgatctccgtatttattaagaaggctaatatgacaccattcgtncagccaaaaccaagctggcctcatattntccgcatttctg

SEQ ID NO: 1176 - DNA, 299 bp, Ctenocephalides felis
  misc_feature (63)..(63): n = unknown
  misc_feature (273)..(273): n = unknown
ttggcaatgaaatacagttgggaaaggactaaatcggcttcggtgctaaggcttaagctctanaaattctttcccattttgggatttttcccggggacaaaggcagaaaaacttggtaaattcaccggggaattttaaatggtagaagcaaaacatccaactcttggaacccggagataccaccacctccagaaaatacgtctgcaggtaacgtcattgttccacaaacggaaactgatttaaatattcaaaaatcataaaagcggtcatagntttattaatgagttggaaataattgt

SEQ ID NO: 1177 - DNA, 230 bp, Ctenocephalides felis
  misc_feature (30)..(30): n = unknown
  misc_feature (120)..(120): n = unknown
  misc_feature (228)..(228): n = unknown
aggtgagcgtttggtgaatcctgaagcatnctgttcatagcaacagctgattgggatatcagcctgcgctgtccggactggaccatggtgctcttgacgagcaatcctacacatctcatngccataacgaaatacgaaaattattagtgaaccttcgaaaaatcaggaaccccgttgtaaatgatagatggacacacacaacgcgcgtttgaaatgaccgacactgtngt

SEQ ID NO: 1178 - DNA, 318 bp, Ctenocephalides felis
  misc_feature (8)..(8): n = unknown
  misc_feature (283)..(283): n = unknown
ggcaacanctttgccttgggcaccggctgctgctttggcagcataactcctgctgttcgataaaatcgatgcgattttacccgattctgttttgctcagggttcgcaaagtggaattgattacggagtgcatcttgtaataaaatgtatagccagttgagttgaattaaattgatctcacctgtaagctactgaacgaagaatattaaatcctttatgagcactgatagtattttttggagtgtgcttacgtaacttctgcacttttcagtttcattgcttgnaacattttcttgaggagcgggtaattcggcatggt

SEQ ID NO: 1179 - DNA, 329 bp, Ctenocephalides felis
  misc_feature (181)..(181): n = unknown
  misc_feature (185)..(185): n = unknown
  misc_feature (192)..(192): n = unknown
  misc_feature (195)..(195): n = unknown
  misc_feature (287)..(287): n = unknown
  misc_feature (327)..(327): n = unknown
tgtagccaccgcgatacgaatcggaacgcccatgcttatcatccatgtttctggatagctgactcacaaactaacttcaatggaaccccaactcacacgtcaaggattttgattaaatacacgtgcaaatttgaataatcaaaattaaacttgtcttataataaatgttccacacatttgncctnctgcatntgnaggtatgatgatattgaactggcacgagtgcacttaaaatagttgcattataatattaattcgttgcacttgaaaatttaatgctgaaatgncgaaatagtccacacagcctacaagcacgtaacacacgtnaa

SEQ ID NO: 1180 - DNA, 190 bp, Ctenocephalides felis
  misc_feature (9)..(9): n = unknown
  misc_feature (14)..(14): n = unknown
  misc_feature (31)..(31): n = unknown
  misc_feature (48)..(48): n = unknown
  misc_feature (121)..(121): n = unknown
ttatattanagggncgtgttgaggtaactgncggaaaagaaaatttantctttgagagtggtccatttacttattttggtcttcaagcgattacacaaaacattggagttgccgattctgngaaaggatctatgcaatcgttaaatatagatggtatattaaaaaacagttttataccagactatacagt

SEQ ID NO: 1181 - DNA, 305 bp, Ctenocephalides felis
  misc_feature (161)..(161): n = unknown
cgttacttccaaccatttttgcaataattttaactatgtcttattatatccctttgtgcatatagggtttaaactgactaacaagtatcacttttttttataaatatccaagtatcatacgacacacgtttataacgatttcataaattaaatatcactgnttgtttttgtacaaaggcactttttgtcttcaagcacacacgaggctttaaactaccaatgtaatatttgactagaataattttaattgtttcagcgtccactgaaggctttaagcaacttcgtgccaaacagactctttgtcg

SEQ ID NO: 1182 - DNA, 58 bp, Ctenocephalides felis
  misc_feature (35)..(35): n = unknown
  misc_feature (43)..(43): n = unknown
tacgatttagccgaggcaaataaaaattctattgnaaacccanagtggaagcaaatgt

SEQ ID NO: 1183 - DNA, 383 bp, Ctenocephalides felis
  misc_feature (3)..(3): n = unknown
  misc_feature (33)..(33): n = unknown
  misc_feature (47)..(48): n = unknown
  misc_feature (57)..(58): n = unknown
  misc_feature (263)..(263): n = unknown
agngggctaatataggatctttataattaccgnagggccaaattagnngacaaaatnnaactgagatttgtaataaagattgcaaacattttcaaaaaaaaaaaaaaaattgaaaattttacgatttttttcggaggagggtaattttcaatatacggtttcacagaggggaaaggggatttcaaaaattttcaaaaaaatcgattacgtgattaagtgacgtcccgagcacaaaacttatgggtccaaatatatttaaaatnttaaaagtccaaatgtccaaaatctgtattacaaatctgtcagtctttttgcaatcctttatcaaatattattttccatcaaagcacacacttttttatacatgcattttccaaatacgt

SEQ ID NO: 1184 - DNA, 500 bp, Ctenocephalides felis
  misc_feature (56)..(56): n = unknown
  misc_feature (70)..(70): n = unknown
  misc_feature (88)..(88): n = unknown
  misc_feature (117)..(117): n = unknown
  misc_feature (131)..(131): n = unknown
  misc_feature (137)..(137): n = unknown
  misc_feature (193)..(193): n = unknown
  misc_feature (240)..(240): n = unknown
  misc_feature (242)..(242): n = unknown
  misc_feature (244)..(244): n = unknown
  misc_feature (250)..(250): n = unknown
  misc_feature (254)..(254): n = unknown
  misc_feature (307)..(307): n = unknown
  misc_feature (324)..(324): n = unknown
  misc_feature (328)..(328): n = unknown
  misc_feature (477)..(477): n = unknown
tttttttttttttttttttttcacataatatacatttattttcaatttaattaacngggaaatgctattncataaatataacgtattntaacatacaaaaatcaaaacatatttatnctactaagtttatnctgttngcaacagttgtcttaccttaaagtaaaaactgggggccctgccctatatacactgngtctatttactgattacaatcacatctgacaatcccaatcacaattnantntaatcnccanctcatttatttaatttataatcaatatgcctggatttgaatttaaattcaatnggaaaaccaatcagatnggtngcacacataaatatactattttgtattttatcgacatgaagagataagttatatttttagatcaccactgacttttttacttttgattaagtctcaaatttatattatatatttaaatattggtttataatactgaatatttgatgtgngaatattattaagccaaaagatt

SEQ ID NO: 1185 - DNA, 327 bp, Ctenocephalides felis
cttctactctatcgcctctgaagaaagaccaatctttaataggctcgatgaagatttttttcttggcatcaagaggtgaattatcttgtcggaattcttgagaccatggtcggtgagctccgaagtagaacttcctttttttgatttctttcctcgaataattcggtttgttaggagttttccaatatacttgttccatgcttcgcttaatgtagttttctggcaaattggaatattgttttgttaaatcgccaaccttttggcataattgcaaagatctcctcatgtttgaaattatttacacaaaatcaatgacagaataatagt

SEQ ID NO: 1186 - DNA, 498 bp, Ctenocephalides felis
  misc_feature (153)..(153): n = unknown
  misc_feature (338)..(338): n = unknown
  misc_feature (402)..(402): n = unknown
  misc_feature (455)..(455): n = unknown
  misc_feature (458)..(458): n = unknown
  misc_feature (492)..(492): n = unknown
atataagtaaacaccaaaataatccattggggttccaatagattatattcataattaatattacttacacgtagttatatttttattggtaggaagtagtgatcattaaagttcaatttgaaaaaatatcaatttttttttatcaaatgctgngtatggaattatatatacaatttcatttataaatttgccaaatactaatttataggtgattatattttctattctgcccatcacaaataaatgaattcttttttatattccctccatttgcttttagattcagtagtaatcactacttctatcaataatcaatgcatatccctaattaagagagnagattcaaatatcattttattaattctaaagaggattcttatgttgatcgatattttaacatgntgaaaggaaaactgaacgacttgctcctttatattctcattttaatagcagantgntttttgaattaggtataatatctatatttatgcnaaataa

SEQ ID NO: 1187 - DNA, 496 bp, Ctenocephalides felis
  misc_feature (5)..(5): n = unknown
  misc_feature (33)..(33): n = unknown
  misc_feature (421)..(421): n = unknown
  misc_feature (424)..(424): n = unknown
  misc_feature (473)..(473): n = unknown
  misc_feature (481)..(481): n = unknown
  misc_feature (492)..(492): n = unknown
aagcngaaaaaatatgaaaaatatgtaaactgnaataataataaatattataattattgggcaattaatattaattataaaactattattatatttctagaagcaaaatttttttttccttaaagatgtttttttgtagcatgtgtatttcattcaatttacaattattatgaaggagaaaaactgtcgaatatggagtcacgttttactttaaaatttcaataaagtattttaataaataacatgtttaatgaatttaatatttttccatttattatacacagagagaatgctttatattcaaagatttatgttttaaaatcatttttcataaagggtttcatatacgacttttatattctaaatcattaatttttgggatttttataataattaataaaacaaatttattcagtacccnacntcagtatttaaaaattattaacaaggatatgcttatattaatcaaatgngagtgggnaattatttgcncaaa

SEQ ID NO: 1188 - DNA, 448 bp, Ctenocephalides felis
  misc_feature (37)..(37): n = unknown
  misc_feature (39)..(39): n = unknown
  misc_feature (43)..(43): n = unknown
  misc_feature (63)..(63): n = unknown
  misc_feature (65)..(65): n = unknown
  misc_feature (73)..(73): n = unknown
  misc_feature (75)..(75): n = unknown
  misc_feature (82)..(82): n = unknown
  misc_feature (102)..(102): n = unknown
  misc_feature (114)..(114): n = unknown
  misc_feature (131)..(131): n = unknown
  misc_feature (179)..(179): n = unknown
  misc_feature (195)..(195): n = unknown
  misc_feature (197)..(197): n = unknown
  misc_feature (239)..(239): n = unknown
  misc_feature (335)..(335): n = unknown
  misc_feature (415)..(415): n = unknown
  misc_feature (417)..(417): n = unknown
ccgggcgggggaccagaagtttacttacataacttgngngggnaacttattccaaaaagatgngnttacgggngnatatagnagaataagatttaatatgtnatattacatggnacttaatttttaattgnatatcaatctttagtataagcaagactacgagggccgtattttaatgnatattaaaaatgatgngnataatcattatttctatttaattcaaaagagtatatatttgnaatatctatatttaaacaaatattattaaaataatcatatataaattatacagcattctattttattcaatggcatgagcattcaggacgtaaagngattaacagggttcgatcaaaatagaattctatagttttggtctaaaagaaacgaaattttaaaaaaattatgttattcngngggtttattacagctattaaattttttacct

SEQ ID NO: 1189 - DNA, 117 bp, Ctenocephalides felis
  misc_feature (3)..(3): n = unknown
  misc_feature (16)..(16): n = unknown
  misc_feature (18)..(18): n = unknown
  misc_feature (27)..(27): n = unknown
  misc_feature (44)..(44): n = unknown
  misc_feature (60)..(60): n = unknown
  misc_feature (64)..(64): n = unknown
  misc_feature (73)..(73): n = unknown
  misc_feature (78)..(78): n = unknown
cgnacgccctcttaancnccttaaaangccctcgagcgggccgnccgggcacggactttnaaantacaaattnacggnattgttataaactaacagaattgacagttttataattgt

SEQ ID NO: 1190 - DNA, 213 bp, Ctenocephalides felis
  misc_feature (14)..(14): n = unknown
  misc_feature (31)..(31): n = unknown
  misc_feature (43)..(43): n = unknown
  misc_feature (51)..(51): n = unknown
  misc_feature (62)..(62): n = unknown
  misc_feature (70)..(70): n = unknown
  misc_feature (87)..(87): n = unknown
  misc_feature (122)..(122): n = unknown
  misc_feature (141)..(141): n = unknown
  misc_feature (168)..(168): n = unknown
caacaacaatttcnaaacaaaatggctgganggataaaacggntaaaaaanggtattcaatnggattggnttttggtaccggtaatnccctaaagggaggcaggggcggtactttttctttntgggcggtgggtggacttnggcccaatggtcaatttcggttatttnccaaacttcaaggcttttgaaactttggcattcaaaggacaaagt

SEQ ID NO: 1191 - DNA, 207 bp, Ctenocephalides felis
cgctatcacagcaaaagaaccagccatgattgccgaagtgtcggtgactctcatgtgattcatataatcagctttgtgttgcttgtgatgatggtgcttgttgaattgttcttcatgttcattagattcacgatcctggtgaattggttgaaccaactcggctccaaaatcaggcgacgaagaagagctttcctgaatcctctccgt

SEQ ID NO: 1192 - DNA, 330 bp, Ctenocephalides felis
  misc_feature (6)..(6): n = unknown
  misc_feature (24)..(24): n = unknown
  misc_feature (52)..(52): n = unknown
  misc_feature (92)..(92): n = unknown
  misc_feature (136)..(136): n = unknown
  misc_feature (184)..(184): n = unknown
  misc_feature (200)..(200): n = unknown
  misc_feature (208)..(208): n = unknown
  misc_feature (241)..(241): n = unknown
  misc_feature (303)..(303): n = unknown
agggantagtaaagggaaattagngcccattgataccaaaacaaaagaattnggtctggctttaatttcaacaaaaaaatggttggggttantggagggaatgaaaaaaattcactggaattaaatggcggtctanttccctcacccatttcaacaaggggatcaacgaaaggggtgggcaatngttttcaagccgcatnccaagttnattttagtaggaatcaagcccctcaagcggatnccctaccttcttaattttgcttgcaagggtattgaaaccgggttttaagcttggcccattgnaccgggtctttggctaaccaaaaaagt

SEQ ID NO: 1193 - DNA, 149 bp, Ctenocephalides felis
  misc_feature (30)..(30): n = unknown
  misc_feature (59)..(59): n = unknown
ataaaacaaacaccccgattataaaatatnaaaatatgtaccatatcattaggttaagnatgtaaatagcgctcgaaaattatttattaataaaacattcttaaaataattgattgcaattatgaattcattaacgatatttgttatgt

SEQ ID NO: 1194 - DNA, 342 bp, Ctenocephalides felis
  misc_feature (18)..(19): n = unknown
  misc_feature (49)..(49): n = unknown
  misc_feature (58)..(58): n = unknown
  misc_feature (134)..(134): n = unknown
  misc_feature (180)..(180): n = unknown
  misc_feature (315)..(315): n = unknown
  misc_feature (317)..(318): n = unknown
  misc_feature (322)..(322): n = unknown
aaaatggcattatatgcnnattataggctgagcctttataaatctgtgnatgaaccanaccactctatcttctaacctaaagtgtaattttgttttacagaatttctttaataggtaatatttttaattgcagngtatcatattatagtttgtaggtgttatattttatttgtaaattgntgttcatatttctcaaacgattgtttatgtattacacagtattaaaataaaccttggatgcaataattgttataacaacattgttgttagtaataaaattttatcaatggattattaaaaaaaaaaaaaaaaaanannaaanaaaaaaaaaaaaaaaaaaaa

SEQ ID NO: 1195 - DNA, 131 bp, Ctenocephalides felis
  misc_feature (30)..(31): n = unknown
  misc_feature (60)..(61): n = unknown
atgatggcattcatgacgacttctgtcgtnnaacaggcattttttgttcacaaatcctgnncagtaaatcataaatataacgaaactatttgtagaaacctttctcagtataaagacatcaacaccaaagt

SEQ ID NO: 1196 - DNA, 463 bp, Ctenocephalides felis
  misc_feature (17)..(17): n = unknown
  misc_feature (47)..(47): n = unknown
  misc_feature (49)..(49): n = unknown
  misc_feature (57)..(57): n = unknown
  misc_feature (332)..(332): n = unknown
gtgcagtttttaattgngaattaaatatatgttgatttaatttttgngnaaactgangagcgtttatttaaaatcaatattaaactaacattgctaaggtgatcttaaatggtgaaatgttcattatcatattaaatttcaattcaacgtatctacttcatcaaaataaataattttattggtgacttcaaattatcaatatacctccttcaaattataaatatacctcaattttttttcacatgccgtgcagtgccgtttgaaaattgtaagttacatgcttttgttgatttgtaattgaatcttttgatgtcttggaaaacttttattgntacacataaaggatgaattataaatcaatggaagcatgtaatgattgcattacacatattcgcctcatatatattaagtatattttggtggtaattcttgcacttattggttaatattttattcaaatatg

SEQ ID NO: 1197 - DNA, 252 bp, Ctenocephalides felis
  misc_feature (1)..(1): n = unknown
  misc_feature (3)..(3): n = unknown
  misc_feature (12)..(12): n = unknown
  misc_feature (24)..(24): n = unknown
  misc_feature (30)..(31): n = unknown
  misc_feature (37)..(37): n = unknown
  misc_feature (40)..(41): n = unknown
  misc_feature (64)..(64): n = unknown
  misc_feature (109)..(109): n = unknown
  misc_feature (122)..(122): n = unknown
ngntcttcaacnttgctctccaangccctnnagcggncgnncggggacgtttttttttaactgntaaaatatttattataaaaatacaaaacaaatttcataaaatatncattacaatttgngaccaaaaaaattaataattccctgttgcatcaatattgccttacaaaaaatttccacgaatgaaaatttatattatattctatttaaacacttattaactattatttttagttcaagctaatgtaacgg

SEQ ID NO: 1198 - DNA, 444 bp, Ctenocephalides felis
  misc_feature (57)..(57): n = unknown
  misc_feature (63)..(63): n = unknown
  misc_feature (350)..(350): n = unknown
aacaaaaaataaaaaataacccattttactggattcatttgaataataaatatgttngtctgnatgggttttttcttaaaaaaaataaccaatatctacaattgtctttgacacaatatattaataacagacactaacatagtatttgaaataacatagtattaatatttgtattaaggcactcaatactataggaatacttggaacgcgcattgctaaattcctcgcttatccaaaatacgtataaatacttattatcaattataggggcatattgctaaatgacttaaaatcaataaaaagcgaatctcgcgtataaaaaaatgccatcatcatatctcactgtgtgnaaaaatattaaaaatttgatcacgatgattttgctgatcacaacttatgctagactcacaatatgtgaattaaacatgagctctcttatatttg

SEQ ID NO: 1199 - DNA, 498 bp, Ctenocephalides felis
attattcataagacatcaaagactttattacataagggacaacatagtaattaaagttacagaaacaatgcagagtcaatacttcgattgcttataggaattcatggaggtcgaagaaatttctagtatatttttgatttcaaattttaatactcagttaatggtatgaatgctaagtctctctctactttattcatatatgacaatattgcacatttgtgcacgaaaccttgagttgaatttttcagagatagttatgcatgaaatgttgaataccagtatttgctccaacggccttcctgcatgcgtctatatggaagctatgaactcattttaaagttgaagattttatggaattaattataagagcataatgactctgagtttgaggaacttgcttatgtttaactaaatcatttgcaacaacatttaaagtcggaactgttcacaactggaaacaggatatctgcatttataatactttaataataattgcat

SEQ ID NO: 1200 - DNA, 226 bp, Ctenocephalides felis
ttaaatatttatatgatatttctctacgatgtttaataaaaaaaaaattgattgttttgaacttgaaatgtagatttggaatatctgcacgactgttattaatttaaaaagttcaaagattgtttattcaataaggaacatattaaatatcatattgttaaatttttatatattgatctattgtaatctatctctgtgattaacatttaccaattaaaattggagt

SEQ ID NO: 1201 - DNA, 228 bp, Ctenocephalides felis
  misc_feature (58)..(58): n = unknown
agtatatagatagatagaaaataaatatagatattaaactgtgtttaattaaatattnacaacatataatttataaatatatgcttagaaaaatacttgtagcagcattaaaattaacatatcaagcatttgttttcataaaaattaaaaactgcttcatttatatgatgaaactatgatcgtaaggcttgcaggcgactctgcatttcttctaaatcttcttctggt

SEQ ID NO: 1202 - DNA, 70 bp, Ctenocephalides felis
acttagcgggcgccgtgcaagtgattcgaccaaagacggacaccgaagtagacgtggaactataactggt

SEQ ID NO: 1203 - DNA, 114 bp, Ctenocephalides felis
ggcgcaacccttttggcgactgcctcacctgccttcttagtgagtttcttaagattatttctctttttgatgttaagaatagtcttaactctcctcttgttttcaagagtacgt

SEQ ID NO: 1204 - DNA, 337 bp, Ctenocephalides felis
  misc_feature (31)..(32): n = unknown
  misc_feature (55)..(55): n = unknown
  misc_feature (65)..(65): n = unknown
  misc_feature (152)..(152): n = unknown
  misc_feature (219)..(219): n = unknown
  misc_feature (231)..(231): n = unknown
gaatactggttcataaaatttagaagccctnntttttcgcctacggcggtatggngttccgattngtgtccgggcttgtccaaaaatgtaaaatccacacgcgcatcttccaaaggcgtcaattcatgtaaaacattcggtaaccttaacanttgtgttactaaattctcctgcacgggttgaaaacaatccttaagcattttaaatcatcccttacanttttaccctggntgattaatttagtaaattccgtcaccggatttgtcgagtgtttaactttatcggcgatgctggttctgcacgcgttcaattttcggcgtgttttgtcaaatcttgg

SEQ ID NO: 1205 - DNA, 445 bp, Ctenocephalides felis
  misc_feature (40)..(40): n = unknown
  misc_feature (132)..(132): n = unknown
  misc_feature (287)..(287): n = unknown
aaatatggcccaaacaaaatattgctttttctctaattgngctttttaatgaagaatcatacataagtatgaataatttcctaactaatattgctttatcattgatttctttgaaatcagtgtctttaaagnttcctatttcacttccatttggcataggaagttcactgcaacgagaaatcaaacttatacctacacaagctgcttcaataatcattggtttagaggacataacatgttgtaacaatgcatttactgcaattgtataagtattgctttcaatcagnttactagaatccctttttgaaatttgtattctacgttcacatgcattgctaaatgctaatatcagcccatgtttgttttcatcagatatgttagctgattttgattgcgttatcatagactgaatttctttttcaaattcaaatgctttcatagtggt

SEQ ID NO: 1206 - DNA, 383 bp, Ctenocephalides felis
  misc_feature (367)..(367): n = unknown
  misc_feature (371)..(371): n = unknown
catataactgtatgaacagtactatataaatgatgcgtgtattataatttcgagttaaaacattttatttgtgattatacttgtgatttaatatacaatatctattttaagttatgacatgttaccgactcaaaaaagttgatatattgaatttttatataatttaaactatttgtgaagagatttaatacttctatttatgtataattgtaaataataaatacagtattaatttgttgtataatagaagatattataagtatatttagaagcattgattattaattctcttaagcgttcttatcttttaaactgttatcacatttctaaatgtttaataaataaaccagttgaaaaaaaaaaaaanaaanaaaaaaaaaaaa

SEQ ID NO: 1207 - DNA, 350 bp, Ctenocephalides felis
  misc_feature (263)..(263): n = unknown
caacgacgacgacggagatgccaaccacggaaatactcgactacaaccacagaagaaccaaccaccaccacgaagtcaacaacgacaacgagcaatacaccaactccaggatttccaaattgggtgctataattggcaagtgataagataatatccactattcaaataactattaatgttaaaaaaaaattcagtattataaagaacacaaacaatattaataataagttattctttatattcagtaacagtattaattctgnttgtttatgtcgttgtaaaaattatacaaataaattaatttggaaatatgaacaaaaaaaaaaaaaaaaaaaaaaaaaaaaaaaaaa

SEQ ID NO: 1208 - DNA, 147 bp, Ctenocephalides felis
attaactacttttgatgcataaaaagctgcagaagagtgcactaatcgattatgttgaggccacttcattaacacctttgttctaggtatgttatatacctctggtttggctagtcttagaacgcattgtttgtgtgaggctttagt

SEQ ID NO: 1209 - DNA, 304 bp, Ctenocephalides felis
caacttttaatgatattcaacttcaaactcacgtggctaatattttccaagttgatagaagtaaaattaaaataactcatacacctgaaacttcagtaactattctctcttgatttcagtattaaaatataataacaaaaagtgataatgtaattttgttcatgagtttttgctgaaatgatctgaatatttacctgttttcgaattaccaaacattgaaaagttaaaaataaaaaatatttattactttaatttattttagcatatgaacaattcatattgttaacttataataaataatagt

SEQ ID NO: 1210 - DNA, 498 bp, Ctenocephalides felis
  misc_feature (23)..(23): n = unknown
  misc_feature (30)..(30): n = unknown
  misc_feature (33)..(33): n = unknown
  misc_feature (55)..(55): n = unknown
  misc_feature (130)..(130): n = unknown
  misc_feature (138)..(138): n = unknown
  misc_feature (147)..(148): n = unknown
  misc_feature (154)..(154): n = unknown
  misc_feature (158)..(158): n = unknown
  misc_feature (383)..(383): n = unknown
  misc_feature (457)..(457): n = unknown
aaaaggagaagtttctaaagacnatttttnttntacatgtacctagtgagtgtgngggggggaaattgctattgcatattacatacaagcttaataaaggttatggtgatttatttcatttaaaggcaangtatcggnttaatggcnntaaatntatnttttatttaatattaaatagattaattaaaaatctataaagtgataagaggcctgatatccataatattattgaatattaagaagtgacggatagatctgataatgtagtagttgttatagacaatttacttaataattatgagttgcatcattatgcaatgatttatcactattatttattcaacattttatttaactgcttgcaacttttaataaaacgcatnttttattgttttaagtataaatcttattagggcacaatatgaaaataaaaataaagaactttatacaaaagctnttttatcaatatgcttcttgcgctattaagttaagaaattt

SEQ ID NO: 1211 - DNA, 342 bp, Ctenocephalides felis
  misc_feature (25)..(25): n = unknown
caatgacagaaaaacctcgtattgntatcactaaaaattcaattccaacaagtgatctggcttatactaggcgccaagaaaaaaaggcgaacaatgtagatattattcgtaagaacagcgacacttcgaataaaactgactcgtaagaattttgtgaaaagtgtttgtgaaagtattattttgtcaaaaggacgatttaggctatgtagtgactgtatggttaagaactatattagaacttattgctcataaatccaaacatacaataatctttataaaaatcttaataatttattaaatatttttacataaaaaataaaaatagtaaaaacgcaaaaaaaa

SEQ ID NO: 1212 - DNA, 487 bp, Ctenocephalides felis
  misc_feature (27)..(27): n = unknown
  misc_feature (30)..(31): n = unknown
  misc_feature (59)..(59): n = unknown
tgaacttcattatttaaatttaatcanagnntattttttaaacaaaacatagtagcggngtaatataaaaaatacatttatataacacattaagtttaaaaaataaaagaaagcaaactacaaaacaaagtttaaatttttcaaaatcaaaaaccgtagaataagtatcaattataagaatttttttattgcttttttaatatttttatataacttacatgtaataatacatttctttatcatagaaactttttatacatgctattattatctatatgtaaaagattgtgcaaaaatatttgagtaaattttcaaatcaaaataatacgaaacttataatcaagcggttaatgtaatttttttttgtctttttcgacattattatcttaactgtttttaagacttagtttgtgtttctcaatctccaaaataatttatcaccatgaaatatctcttatcatatatttttaaacttaattctataggt

SEQ ID NO: 1213 - DNA, 236 bp, Ctenocephalides felis
  misc_feature (27)..(27): n = unknown
  misc_feature (29)..(29): n = unknown
  misc_feature (58)..(58): n = unknown
  misc_feature (183)..(183): n = unknown
  misc_feature (200)..(200): n = unknown
  misc_feature (217)..(218): n = unknown
  misc_feature (235)..(236): n = unknown
atctgagatacagcgattagtaattgntngccagctacttaaagagtatgctgcatanttatttatacgctatataattatatcttttatattaaattttgataaagaagtgaatataaaaaagattaaatttaattacaagcgtataattgtatattgtttgatttacaccaataaaagcanatcagtaagttgagttnctttaaaaaaaaaaaannaaaaaaaaaaaaaaaann

SEQ ID NO: 1214 - DNA, 379 bp, Ctenocephalides felis
  misc_feature (8)..(8): n = unknown
  misc_feature (17)..(17): n = unknown
  misc_feature (19)..(21): n = unknown
  misc_feature (33)..(34): n = unknown
  misc_feature (42)..(42): n = unknown
  misc_feature (62)..(62): n = unknown
  misc_feature (89)..(90): n = unknown
  misc_feature (112)..(112): n = unknown
  misc_feature (120)..(120): n = unknown
  misc_feature (123)..(123): n = unknown
  misc_feature (144)..(144): n = unknown
  misc_feature (228)..(228): n = unknown
  misc_feature (269)..(269): n = unknown
  misc_feature (342)..(342): n = unknown
  misc_feature (351)..(352): n = unknown
  misc_feature (354)..(354): n = unknown
  misc_feature (366)..(366): n = unknown
gggggttntaagaaacncnnntttgacccaccnnttttttanggggccccccggccgggacnagttgtataaaacataaattgtaagtnntcttacaggcacatgctattgncttattgnatntatttgttctaccaggaaagngctttatagattttactaaatatatattaagaaaagcgttctctgttgaattgtaattaatcctttttgtaagatttacagcangtatgaagaaatgttaaattttgttaaatttcatgtattgnatatgatattcgcacgtacttatgaaatgtatgtcagtcaaatgctgaatttattttaatatacaatctttgnaatacaacnnanaaaaaaaaaaanaaaaaaaaaaaaa

SEQ ID NO: 1215 - DNA, 498 bp, Ctenocephalides felis
  misc_feature (59)..(59): n = unknown
  misc_feature (84)..(84): n = unknown
  misc_feature (451)..(451): n = unknown
ataaacaagcagaaataaatatagctgctatacatatttctgcttgtttatgtaccgancagagtggtaacagaagatactcanatattttaaatgtaggttttccaagcccatccaatgttcccagcaaatcaaatattgacccaatcaatttaagctacagtggaaatcaaatacttactacctcaaccagcccccgaagcacatttagctatagcaatgcactccgtggtcagactactcaacgcccctttaatagaaacacaaatataccaaataatgaccgattttggcctcaactaccccaaagaggaccacaatccggtgacaatactcaatttagttctagcggtgtttcaaatataaatccaagtcaaataaatactcacaatcaaaatgtaagaccacagagtgcaaataataatagaccattcagttacagtagtattgngggtgcatccaataataatctgccaatctgtactcctcaacaactaa

SEQ ID NO: 1216 - DNA, 343 bp, Ctenocephalides felis
  misc_feature (25)..(25): n = unknown
  misc_feature (200)..(200): n = unknown
caatgacagaaaaacctcgtattgntatcactaaaaattcaattccaacaagtgatctggcttatactaggcgccaagaaaaaaaggcgaacaatgtagatattattcgtaagaacagcgacacttcgaataaaactgactcgtaagaattttgtgaaaagtgtttgtgaaagtattattttgtcaaaaggacgatttangctatgtagtgactgtatggttaagaactatattagaacttattgctcataaatccaaacatacaataatctttataaaaatacttaataatttattaaatatttttacataaaaaataaaaatagtaaaaacgcaaaaaaaa

SEQ ID NO: 1217 - DNA, 498 bp, Ctenocephalides felis
  misc_feature (25)..(25): n = unknown
  misc_feature (27)..(27): n = unknown
  misc_feature (54)..(54): n = unknown
  misc_feature (177)..(177): n = unknown
  misc_feature (484)..(484): n = unknown
catatgtagaaataccaatcaattngntgattacatcaaaaatatcaaatgttnaattgaacttttctttgaaaaatatcgatgaactaactattgatttgccacaaatcatatcgcaaacatttggaaatgtgcagaaaactgcaaatcttataccagaaaaagacgaaacaacantttcagataaacaacaaaattttgctaatgaagatttgtatgatccagagaagtttgaccaaatgccaggtccttggcccgttgacctaccattgcctatgccttgttggggaagagaaactgatgcaaagttagatttttcatcagtaatagaatatgaggcatttgccagcagagtagaaatgacggaacagagattattggaagagaccaactatgatactgtagataactttttacaattcagccaggaatatagaaaaatgagggatgcttccgaacaaattatgacctggataaattcttncgtgcttatcacca

SEQ ID NO: 1218 - DNA, 420 bp, Ctenocephalides felis
  misc_feature (3)..(3): n = unknown
  misc_feature (6)..(7): n = unknown
  misc_feature (63)..(63): n = unknown
ccnaannttaatccctgttgatatagcatcacgaaatgctccccattggaaactgcccactgngtatactggctttgcttctttggttatctcttcttcagaatttacttggtctgcaagtagttttatttgcattacgtctctgtaagtttcttttccttgtaaaacagccatggcagattttgctaaagcagaaactcgttttattccactttcagacgctccaggaaacatttcggatcctacattactacatctgcctaacggcaaaaccccaatgggacaagttgcaccatctggtcggcgtaacattcctgtaacagtttcagctaatgttccatcacctccagcaacaagtaaagcgtctggtaatgtaggcatttcctctataatttttctagcgcttccttctgcagttgt

SEQ ID NO: 1219 - DNA, 183 bp, Ctenocephalides felis
caattatctagtgaaaaaatgtctcgattttttttgcacgtgactcaataatctagagtcaataggtaaatagctatttccactgaccagaaatttcatttcaattgacttagctcttatttccgtattttaaacaagtttcaataaacttaagacagttttaatatttctgttttgccgggt

SEQ ID NO: 1220 - DNA, 500 bp, Ctenocephalides felis
  misc_feature (161)..(161): n = unknown
  misc_feature (407)..(407): n = unknown
cctgcaaaatggtaggactgctcaatattgttttattagcttttgcatctgttaacttttctttgtaattctcaattctccataccatgtgccccgttccattaaccggttcactcaaagccttatggaaggcccttgcatcttctgcatcttttatctgntgtgacaattgcgccaccaatctctcttgtttaaccaattgccgacttaatttatccaaaatatctgtattatcttgaactgtgcttttcatagatttcaattcgtataaaaaagaagctattcgagctttttgtttgtccaactcgtctgccgttttcgtatgatcttcataaaagttggaagccacttctcgtctcgttttttgggcatctttttgtaattgtattactgattgcgtatgaganccatgtcttgtctaactcatttactcttgcgaagtttttatcctgccgttaatacgacctcgacttgggttcttggtttcttcatctagtatc

SEQ ID NO: 1221 - DNA, 498 bp, Ctenocephalides felis
  misc_feature (85)..(85): n = unknown
  misc_feature (396)..(396): n = unknown
aaactacaaactacaaaataattaagatcattatatgaatcacataattgtataactaaaaactgcattttatcataaaaattgntataatttttttttataaataataattattattattatcctgaaaaattttgagaattgacaatttccatacattatgccactgaatcataccgaattctgtcaaaatatcatgtatttgctgtgcattcaggcgttttacacataaactgcaaccgtcaatcgtatgttatgaagctgagtcagaaagaccatgttatataacatcgttttttgacgtttgtgtggtttctgggtttttatgtgataacttgagaaatcgcctgactgcagagcaaccgcatggcttttgcaatattcagtatggaaagntgtcgtatcatagccttgcataacataagtctgttatgcggccgaatcggccattaatattaaattttgatgtgatttttagaataaaatatgctcagtgtt

SEQ ID NO: 1222 - DNA, 402 bp, Ctenocephalides felis
  misc_feature (4)..(4): n = unknown
  misc_feature (14)..(14): n = unknown
  misc_feature (179)..(179): n = unknown
ccgnaagggtacanaaattgataaagctaaaaaggacttattcaagaaaattactagtcagttaattgggccgtagtattagtgagttattcagaaaggaagtaaaaattgcaaatctccctttactcattgtgccaaagccagaacaacaagctctcgttgactcaacaaatgatgtnggattaataaaactgtttgatcgaaagtaaattgttataaaaacatctgaacacataatcaatatctattgattaaattttgtatgaatgagacattagcatttaaagtatttatctctaacgcattttctacttaatgtagataactattctttgggaaccaaatctattggttacaataaatatttctaagtgttaaaaaaaaaaaaaaaaaaaaaaaaaa

SEQ ID NO: 1223 - DNA, 207 bp, Ctenocephalides felis
aaatgatattaactttataatttttttttataaaaagccaaaattttctcacgtgcgccaaaaattgtgctacaaaagtaaaacatctggtgcttaacatatttttgttcaagcactaaaaatagtgtttaatttgaccttaaccactttggtttatatttagcaaaaatttattaaaagcgatataaataatattgataattaagt

SEQ ID NO: 1224 - DNA, 427 bp, Ctenocephalides felis
tcatacattgcaactgatgtagacatatattcaagcatacataaatactccttcacaaaataaatacaagatcgatctactaataattgttacattttaatatatatcgctatttactgtttgtaacaacttaagataattcattttcttctatttgagaaagaaaatgatcaaacattttgcaaagaatattaaaatataattatatcacgaaaaagttttattcatggaatcaaaagttattcaaaatgtcaactatttaaaaactaaattaacaattacattcaattttgatacagttattaaagtaacatcaataaattttgaatacgcatttacatgaatagtttcttaaattttgaaatgaaaactgacaattatttaattcaggctaatcttacatttgcaatataataatcactacaag

SEQ ID NO: 1225 - DNA, 263 bp, Ctenocephalides felis; identical to SEQ ID NO: 211

SEQ ID NO: 1226 - DNA, 295 bp, Ctenocephalides felis
  misc_feature (13)..(13): n = unknown
  misc_feature (32)..(32): n = unknown
  misc_feature (76)..(76): n = unknown
  misc_feature (120)..(122): n = unknown
  misc_feature (127)..(127): n = unknown
  misc_feature (137)..(137): n = unknown
  misc_feature (251)..(251): n = unknown
tggttagggcccncccccggacaaaccacaantattaaattagaggagaggtttttttagtaaaaaaaaaaaaaantaaagggcaagggtgaaaggtgggatgcactttcttaaataaannnactgntaaataaagnttatatttatattaaattacaattaggactacataatgcactttaaaaattatggcatagttaagacttcattagaaatacaataagctacaattataaattggattatatttnggatttttatcataaaagaataaaatcattcagaatgcaaaaaa

SEQ ID NO: 1227 - DNA, 335 bp, Ctenocephalides felis
  misc_feature (28)..(30): n = unknown
  misc_feature (46)..(46): n = unknown
  misc_feature (64)..(64): n = unknown
  misc_feature (144)..(144): n = unknown
  misc_feature (322)..(322): n = unknown
  misc_feature (335)..(335): n = unknown
ctggcacttccccaataaaaaacgccannnaaacctaaaaataggnaattaaataagactgggnagcagtgatgatagcggagctgtgtctcctgatacaactacaacaatttctcctttaaagaatgctgcagataaaactgngaagactaattaattttaatgccagataaacttgatttttgatatacatatgttggtatgtagttatgaatttaatatactttaattaaacccattccaaaaatcataattcatattttttaaatttgatttaagaaatcttaatgtgtaactttattttgtttttatttagagctgnaaagttttattgn

SEQ ID NO: 1228 - DNA, 225 bp, Ctenocephalides felis
  misc_feature (10)..(10): n = unknown
  misc_feature (22)..(22): n = unknown
  misc_feature (41)..(41): n = unknown
  misc_feature (54)..(54): n = unknown
  misc_feature (58)..(58): n = unknown
  misc_feature (61)..(61): n = unknown
  misc_feature (65)..(65): n = unknown
  misc_feature (70)..(70): n = unknown
  misc_feature (79)..(79): n = unknown
  misc_feature (91)..(91): n = unknown
  misc_feature (103)..(104): n = unknown
  misc_feature (141)..(141): n = unknown
  misc_feature (156)..(156): n = unknown
  misc_feature (190)..(190): n = unknown
  misc_feature (202)..(202): n = unknown
  misc_feature (209)..(209): n = unknown
  misc_feature (216)..(216): n = unknown
  misc_feature (224)..(224): n = unknown
caaagggttnaaaaggtccggnaacaatcgtttttttttcnaaaataaaaggantgtnaangggnggggntattgggangaaaaaaagtanaagaaccccaanntattggccccgcaaataatgcatgtgaataccttatntcataaatggcgggnctatgggctttgggcacaaaaatggctatcaagntacatgtcctgnaacaagnctaaggngctttcgna

SEQ ID NO: 1229 - DNA, 435 bp, Ctenocephalides felis
  misc_feature (10)..(10): n = unknown
  misc_feature (17)..(17): n = unknown
  misc_feature (37)..(37): n = unknown
  misc_feature (59)..(59): n = unknown
  misc_feature (65)..(65): n = unknown
  misc_feature (144)..(144): n = unknown
  misc_feature (147)..(147): n = unknown
  misc_feature (194)..(194): n = unknown
  misc_feature (419)..(421): n = unknown
tctttaaaanagagttngggttaaattcattggactnttcaagaaatgcacaggcttgngggggnggtgaaaaccagcggtaaacttggaaaaaaatattttggatacaaagttaaacgtgctgatcctgaattaaaaaaaggntgngataaaacctgtcttaaaaatcatatgtgtgcaatagttaccacagntgtatcagatctcatccagtgcaaaaatatcatcaaatcatcatcaagcattcttcagcatttgaatatatatgtcctaggagctattgtaatttccaattatttattattataaagtcatttttgttaagttattataaatttagaataaatcattatgttggaaatatgtaaacgctttgaaaaagctaggatcaaatcaaatattttttgaaaaaaaaaaannnaaaaaaaaaaaaaa

SEQ ID NO: 1230 - DNA, 282 bp, Ctenocephalides felis
  misc_feature (18)..(18): n = unknown
  misc_feature (57)..(57): n = unknown
  misc_feature (202)..(202): n = unknown
ttttatattacatagatnttttcttttatgtttttgtaagctttgaaaaaacaattngtttttcatatatattttatacacaagaatgtcctgtatgcttatttttttaatccaacgaaataaaagaacaaataaacgtaaaaaataactacattatgaaccccaataaaatataatactcctgtgtaacgcgggatgtcgngttcccattgtaattttatgtaaatatgtataatttgaaagctcgtatattgcttgttctattttcttgtatataaatgt

SEQ ID NO: 1231 - DNA, 101 bp, Ctenocephalides felis
cattcaaaagatatcatttaaatttattgggaaattaactataataataataattgatttatttcttaaagctattaacccattattttcaaattgcatgt

SEQ ID NO: 1232 - DNA, 224 bp, Ctenocephalides felis
ggttgaaccgttcaagtattttataagtgatgtctctgattgtgtatttttcaaggcacttgattttatgttcattgttttaatatcaatgtgccttctcggtagtatataaattttacatagtaaatcctgtttttgattttatcgcacattttttgtgttgttttaaattaattttacaagagaccatcacttataagctgtaattttactaaaactaaagt

SEQ ID NO: 1233 - DNA, 347 bp, Ctenocephalides felis
  misc_feature (210)..(210): n = unknown
caactgttgaagatgagaagaaaccagttaccaacggaactttaccaaagattgaagaaaagtgtgacagcgttgcagaccttaatggatccataaataaatctttagatcatctaaagccaccagaagtagcagttgctgatatcaacacctgtattccagaaaagaataaagactttttatgtggtatcagagaaagtcagctcttanatcatgaactgcagtgggactccatggaagacaaggaatccaggcagaacgatgatgcagagtcggaccatagcgaagaagacgacttgggtgaattgccggtaagaaccgtattggatcagtatgcacctctaggt

SEQ ID NO: 1234 - DNA, 498 bp, Ctenocephalides felis
  misc_feature (107)..(107): n = unknown
  misc_feature (203)..(203): n = unknown
  misc_feature (278)..(278): n = unknown
  misc_feature (295)..(295): n = unknown
  misc_feature (317)..(318): n = unknown
  misc_feature (378)..(378): n = unknown
  misc_feature (436)..(436): n = unknown
  misc_feature (444)..(444): n = unknown
  misc_feature (461)..(461): n = unknown
  misc_feature (497)..(497): n = unknown
tataactataataatggggcaattctgcttcataacacatagttgtcatggcaacgcgtagtgaagacttcgaaaacgttaagctatttgccgtgcgatcaggcgtnttttacatataaacatagcaagaaagaatgttatgaaaacagcatcataagattcttctttgcttgtttatatgtaaaataaatgtagacattttnatattgccatgacaacgttatattatgagctctgttacgccagaattgccccataagtttaaatattcttcaatnatctttctccattggtngaaaaatattttatttacagtnntagcacagtcttgtgaatctatttgcgaattctacattttaataataaatataaaaacanctgaccgccatccgcatactagaagaaacattccaatctgatacctcattccatttgntcaaaatnaaaaataaaattacagncgactgatttattcctgggtgcttaaaaaaaatccnt

SEQ ID NO: 1235 - DNA, 337 bp, Ctenocephalides felis
  misc_feature (103)..(103): n = unknown
  misc_feature (157)..(157): n = unknown
  misc_feature (163)..(163): n = unknown
  misc_feature (175)..(175): n = unknown
  misc_feature (179)..(179): n = unknown
  misc_feature (196)..(196): n = unknown
  misc_feature (252)..(252): n = unknown
  misc_feature (297)..(297): n = unknown
  misc_feature (306)..(306): n = unknown
  misc_feature (309)..(309): n = unknown
ttttataagcagaaccaccaggtgaaagataaacgttccaggatcctgcattattgaaaactttcagaaaattaccagataatttattttgtatacaaaacgngtctgtatatgcagcagcctggatggaagatggtaacttttgtattagtttggnaacttntttcttttcatntggntgaaaattggatcgatnatacacttttttgacgcgttgcacaaaagtgaaaaaatcatcgtaattattggttngcaataaatcattcactacaaataacccatgaatgctcagtggtnagttactgntgnaactaacaaaatctatgagagaaagtgt

SEQ ID NO: 1236 - DNA, 351 bp, Ctenocephalides felis
  misc_feature (11)..(11): n = unknown
  misc_feature (25)..(25): n = unknown
  misc_feature (29)..(29): n = unknown
  misc_feature (33)..(35): n = unknown
  misc_feature (44)..(44): n = unknown
  misc_feature (47)..(47): n = unknown
  misc_feature (139)..(139): n = unknown
  misc_feature (147)..(147): n = unknown
  misc_feature (172)..(172): n = unknown
  misc_feature (237)..(237): n = unknown
  misc_feature (269)..(269): n = unknown
  misc_feature (329)..(329): n = unknown
  misc_feature (351)..(351): n = unknown
taaccccttanggattcccttccgngccngaannnggttaacgnggncggcgggccgagggtccatcctagggcgaaaatttttaatatagaaataaaatgaggtcgccttctttttgaaaacccattttgttctttgntaagcagnatcggcaggtgaaacataaacctgncaggatcctttataattaactttcaaataattatcagactctttatttcgtatacaaaatgtgtnccgtataagcagcagcctgaacagaagaaggnaaacttttgtattagtttggtaactttttgcttttcatcagggtgaagatttgaatattnatatgttcctctgacatgtcgn

SEQ ID NO: 1237 - DNA, 156 bp, Ctenocephalides felis
  misc_feature (15)..(15): n = unknown
  misc_feature (33)..(33): n = unknown
  misc_feature (62)..(62): n = unknown
  misc_feature (150)..(150): n = unknown
aaagccagcgatagnatagaactgctatgtttncctccaaataccactgttgttttatcatntaaaaatgccataagtatggagctaatgcatccaatcaccatcaatatatatatatatgaagagtcttttatccttcctgggtaaagnttctgt

SEQ ID NO: 1238 - DNA, 347 bp, Ctenocephalides felis
  misc_feature (3)..(3): n = unknown
  misc_feature (7)..(7): n = unknown
  misc_feature (14)..(14): n = unknown
  misc_feature (16)..(16): n = unknown
  misc_feature (26)..(26): n = unknown
  misc_feature (34)..(34): n = unknown
  misc_feature (36)..(36): n = unknown
  misc_feature (47)..(47): n = unknown
  misc_feature (59)..(59): n = unknown
  misc_feature (94)..(94): n = unknown
  misc_feature (110)..(110): n = unknown
  misc_feature (151)..(151): n = unknown
  misc_feature (154)..(154): n = unknown
  misc_feature (168)..(168): n = unknown
  misc_feature (260)..(260): n = unknown
  misc_feature (294)..(296): n = unknown
ttncttnttttttntntttctttttntttattcngnataaggggggnataattcatagnttatcttacaaattacaaacatgaagtcaagccgnttgatccaatatgaanattggtggatataaatatcgatgatccaaatacaagtctgntgntcaaaccttcaagngatataatacaaaaattatgctggaatgctttgggtaggaactcttatcccgattaaaatgacgagataaaaataaaaacagcaaatatgcntaaaatgaggatgatgtagatgaaataaagatgnnnatattaattaatgatgttaatgaacacttttcttagaagcacttcctgtgt

SEQ ID NO: 1239 - DNA, 598 bp, Ctenocephalides felis
  misc_feature (11)..(11): n = unknown
  misc_feature (14)..(14): n = unknown
  misc_feature (30)..(30): n = unknown
  misc_feature (62)..(62): n = unknown
  misc_feature (67)..(67): n = unknown
  misc_feature (76)..(76): n = unknown
  misc_feature (78)..(78): n = unknown
  misc_feature (81)..(81): n = unknown
  misc_feature (83)..(83): n = unknown
  misc_feature (102)..(102): n = unknown
  misc_feature (116)..(116): n = unknown
  misc_feature (121)..(121): n = unknown
  misc_feature (148)..(148): n = unknown
  misc_feature (158)..(158): n = unknown
  misc_feature (172)..(172): n = unknown
  misc_feature (202)..(202): n = unknown
  misc_feature (287)..(287): n = unknown
  misc_feature (349)..(349): n = unknown
  misc_feature (362)..(362): n = unknown
  misc_feature (366)..(366): n = unknown
  misc_feature (381)..(381): n = unknown
  misc_feature (450)..(450): n = unknown
  misc_feature (480)..(480): n = unknown
  misc_feature (531)..(531): n = unknown
  misc_feature (533)..(533): n = unknown
  misc_feature (545)..(545): n = unknown
  misc_feature (548)..(548): n = unknown
  misc_feature (568)..(568): n = unknown
  misc_feature (578)..(579): n = unknown
  misc_feature (598)..(598): n = unknown
tataatataangtntttagtattaaatggnttgagaaactaatttagttaagttgtatacantaaantataatcgngnganantatgtttatatttacaaancctcgagatggagnttaangttagatgaatatattaaaatgtatgntctaacaatngtaatattaatgtnaattttaacccggaaattaaggaaaacatngctttgatgactacttagcttccgatccagaggtgatttagacatttagttagcattttaaaatattgtgtagctaacatttcgngtgattttgcaactaatcagttatttaagaaatgtgcatataattattatatacatattatnttacatacctggntagnattcaaaaaacttgncaattacttcgccaaaagaacattggggggataataatatcatattatgcaacattctttattacgggnagtttacttgaaggatctggtttcttgctntttttcatttgatcagaaaataatcaaatctacagtatttgggtagcagtntncgaaaattaacnggnttaccatattaaaaaatttntataattcannacccggtttgggaaaaaan

SEQ ID NO: 1240 - DNA, 446 bp, Ctenocephalides felis
  misc_feature (17)..(17): n = unknown
  misc_feature (64)..(64): n = unknown
  misc_feature (166)..(166): n = unknown
  misc_feature (173)..(174): n = unknown
  misc_feature (177)..(178): n = unknown
  misc_feature (189)..(189): n = unknown
  misc_feature (236)..(236): n = unknown
  misc_feature (269)..(269): n = unknown
  misc_feature (289)..(289): n = unknown
  misc_feature (302)..(302): n = unknown
  misc_feature (312)..(312): n = unknown
  misc_feature (352)..(352): n = unknown
  misc_feature (354)..(354): n = unknown
  misc_feature (372)..(373): n = unknown
  misc_feature (406)..(406): n = unknown
  misc_feature (416)..(416): n = unknown
  misc_feature (434)..(434): n = unknown
  misc_feature (445)..(446): n = unknown
ttgaaattttatgtgtnattatatttattatgttagtaaacaagtgaaaccgctgctataaagnattgtttaatctgaatgtttatatatattgtattttcaagattatcggcactatggtatttcttacaacattcatactatacaattataaaaatatatgcantttttgnntgnntacatattggnggataacccacaaataatatgaaatggaaaaaaaaatgtaaaccggngacacaaaatactggagacaattattataacangggatattcaacttttaaantttcatcaatagntttttatganctcgcttttgaaggattcattcatttattcaatccaatgncnaatcataaatttattggnntttaggggcactactatattggattaataaganaaacaacttngttatgaaaaaattcaantaaaaccatgnn

SEQ ID NO: 1241 - DNA, 274 bp, Ctenocephalides felis
tttaagtctaaaagaaatccaagcttttttatctcaaagtatcaattttgattttaaggtgatttaattattttatataattatatataaagaaactgttttacaatcagtgaatatttccacaaaattattaaaactatataaatataatacaagtccatcataggtatgactacttttgacgaaatattcataattttgaccaactaccctctttcataattttgaccatattatcaagttaacccaaacttatcttaaatatgcgatatgt

SEQ ID NO: 1242 - DNA, 102 bp, Ctenocephalides felis
  misc_feature (58)..(58): n = unknown
tttggatccattcattttatttacaacttactatgtaatgtaaattaaatgtgaatgngattattataataagtgaaaatgtttgttattcaatcacattgt

SEQ ID NO: 1243 - DNA, 193 bp, Ctenocephalides felis
  misc_feature (35)..(35): n = unknown
  misc_feature (65)..(65): n = unknown
ttcaaaatatacaaattcgtatatgttatttattntatatcaccaatttatacataagcatgggnaaaattcttacagaattactgaaacataagataaaatatgttcaaaaatatgattgacgtatcactggcagctttgtaatattaatattgaacgatatgccaattgcaattgcgaaatatattatagt

SEQ ID NO: 1244 - DNA, 498 bp, Ctenocephalides felis
  misc_feature (31)..(31): n = unknown
  misc_feature (31)..(31)
  misc_feature (58)..(58): n = unknown
atcgaaatagtcttcagcatcatcgactgtnaccacacaaggtggtgctgatatgttngtcagcgttttgagtaatcccaaaagtaaaaccgctgataatgtaactgctatgatcaattggagagatctatcttgatataagtttcctactaaccaagcacctcgccatgaattcacacatataaatccataaacagcggtgtagacccacgaagatagtgcaaaacatgtgttagatttaccttctaaatatcttttgatcggtccttgtgccaagcaaaatataaacatcccaataaagcctatggccaaagacacgaaactgctatatatttcattatctgtataaacataatgtcccattagattccacgtgcctctccaatacccgactacggcgggcgcaaccagtgttagagcaaatagagcatccaaaacatcaagaataactgatgatttcaaaggattcatagtcatcaatgatcaccggaaggtctc

SEQ ID NO: 1245 - DNA, 112 bp, Ctenocephalides felis
  misc_feature (60)..(60): n = unknown
  misc_feature (63)..(63): n = unknown
ttttttttttttttttttataaaataatcttttattccaaacgtttcgacattcaatttnggngtcatcatcagtggatattgaacatagtattttatatctaaaaatgtgt

SEQ ID NO: 1246 - DNA, 379 bp, Ctenocephalides felis
  misc_feature (34)..(34): n = unknown
aaccgttggcaaatatcaacttccacatcatcancaaatgttttatcccaatcaggcgatgaatccaaatgattgaattcattacactgttcaggctgagtgtaaaataatgatgttggactttgaggcggagtaaaatgatttagttccactttatcataaatgcgttcaaattctcgtaaaagactctcagtgtcttgttgaataaaatctgtggtatcaaattgctgaggaaatttggtttctccgcttagagttttgttcataccagttgtagtagacaaatcctccagcagaggcaaatccactttctcctccagccattgagaaaatgcttcattagtaaagttatcttccagcaagcacgaatcagcaaagt

SEQ ID NO: 1247 - DNA, 230 bp, Ctenocephalides felis
  misc_feature (14)..(14): n = unknown
  misc_feature (60)..(61): n = unknown
  misc_feature (64)..(64): n = unknown
  misc_feature (73)..(73): n = unknown
  misc_feature (200)..(200): n = unknown
ccttgctgaaactnctcctgatatgggcgatttttttattaaagcaagcgaaaaaaaatnnggnaatgaatgnctcagtaatcttaatgccgaagcacaagaaaaatttgccaatagagtcaacattataatcaaacaagccaaaagtaaagggtttgtttaacataatacaaaatagcaattagaaggtttagaaaggnttaataataactaattttgtacctcggacg

SEQ ID NO: 1248 - DNA, 498 bp, Ctenocephalides felis
  misc_feature (27)..(27): n = unknown
  misc_feature (271)..(271): n = unknown
catctattaattccagtatggtgcttncttgcaacaacatcctggataggaagtcttctgattcaacctccgcgtctaaattcataagtccactttttccatctttaggattagttaaattcgataacaagatttttaaaaacatctgtaattcaagtaaatcactaataaaaaaatctctatgtgctggctcgtcaagaatacttaaggcttcaaacccaacagcaaccgatgattggtcaatttcattagcatcatctccagcaataanatcaatcttgaactccttttcttctattttatcattaaaatatgcaaacataatttcttcttcagtttgactatcatcaaatgccacttcatagggcagcttatctaaaacaacacgcttcggttccttgcagtgtatgaattgataaacggtcgtgttaccaaattcaagaatatgtctaacaaccgtctagtcctacctttacatttcttttatttttgaatcct

SEQ ID NO: 1249 - DNA, 290 bp, Ctenocephalides felis
  misc_feature (31)..(31): n = unknown
  misc_feature (39)..(39): n = unknown
  misc_feature (227)..(227): n = unknown
agtatcagtaggagtgttatgtgcaaatttntaaatcgngtatataaaatatatatggtatagattaaatgaatcagaacaatcttaagagccacaaggtgtatggcatctagaggataccgagaggatactaaaacgaaatgatagatttaaaaagtgtttccaccttatatgtcttcaaaatatgtaaataaaaacatcttgaataaaataatttctcaatgttngtctgaaattgaaagttgtgattaaagttatagttactagatgaaaaaaaaaaaaaaaaaaaa

SEQ ID NO: 1250 - DNA, 345 bp, Ctenocephalides felis
  misc_feature (31)..(31): n = unknown
  misc_feature (61)..(61): n = unknown
  misc_feature (63)..(63): n = unknown
  misc_feature (83)..(83): n = unknown
  misc_feature (130)..(130): n = unknown
ttaaataagacaaagaaattcactccaccanttccctatactatccctttaaagccctttngncacttcaacgtccacatagntttccacagatggcgccacatagaaatcattgcttttttataatcgngttcgaaaaaatcttatcttattgttagtctattaattaagagttaagtttttgttaacttgtcaacttgttttcggttgttaatatttaaataaacaaatgaatgtaaaagtgactgacttgtcgattcaaattgttattacaaacaaatcagtcatttaactttgaacccagtcaattgttaaaatacatattataaacacatacacgtaagt

SEQ ID NO: 1251 - DNA, 498 bp, Ctenocephalides felis
  misc_feature (20)..(20): n = unknown
  misc_feature (25)..(25): n = unknown
  misc_feature (38)..(38): n = unknown
  misc_feature (49)..(49): n = unknown
  misc_feature (110)..(110): n = unknown
  misc_feature (132)..(132): n = unknown
  misc_feature (175)..(175): n = unknown
  misc_feature (177)..(177): n = unknown
  misc_feature (183)..(183): n = unknown
  misc_feature (220)..(220): n = unknown
  misc_feature (240)..(240): n = unknown
  misc_feature (251)..(251): n = unknown
  misc_feature (253)..(253): n = unknown
  misc_feature (259)..(259): n = unknown
  misc_feature (308)..(308): n = unknown
  misc_feature (319)..(319): n = unknown
  misc_feature (347)..(347): n = unknown
  misc_feature (355)..(355): n = unknown
  misc_feature (381)..(381): n = unknown
  misc_feature (384)..(384): n = unknown
  misc_feature (417)..(417): n = unknown
  misc_feature (419)..(419): n = unknown
  misc_feature (432)..(432): n = unknown
  misc_feature (450)..(451): n = unknown
  misc_feature (454)..(454): n = unknown
  misc_feature (458)..(458): n = unknown
  misc_feature (468)..(468): n = unknown
  misc_feature (483)..(483): n = unknown
ttaaaacaaagaaaattacnttcanatatttttttatncttagttcagngtgtgcatatattggttatttagaaatctttataaacaataggacacttacatttcaaaantaggtgttacgaataaattatnatctctttcactacatatattacaatcaacatttattaaatangngttgantttatttattgtgcaaataataatatgctttccatgntctgtaatcaactgattaanttacttgtatnangcagtngttttacctacacattttagctactggtaagctaggcataacgtgaaangtatatcttanctcgttttgacatcaaaagccttttcancttaatgnaaagaatggaaatttatgtaataaantangagcaccctttccaatcattggtgatgccctangntatgccctatganaatgttgtcatcataacnnttntganataatccgantttatatgaatcttntatatgtgcgaatat

SEQ ID NO: 1252 - DNA, 258 bp, Ctenocephalides felis
  misc_feature (32)..(32): n = unknown
  misc_feature (84)..(84): n = unknown
  misc_feature (93)..(93): n = unknown
  misc_feature (187)..(187): n = unknown
  misc_feature (214)..(214): n = unknown
  misc_feature (239)..(239): n = unknown
tcttccatcatggagaacatttggggtaaccntaatcttaaagtattcaaccccaataaaggcagaagttgtatagcacacacnatgatgcantttttcaaatgtggtgcataaaataaaggcttgaattgtttgaaaccagctttaagagcttccattccttcaggtttgggagaaccatcttgtncattggctttggtttctttcaccagtngttttattggatattcagtcttgtnattccaatgattaatcctg

SEQ ID NO: 1253 - DNA, 364 bp, Ctenocephalides felis
  misc_feature (24)..(24): n = unknown
  misc_feature (35)..(35): n = unknown
  misc_feature (42)..(42): n = unknown
  misc_feature (45)..(45): n = unknown
  misc_feature (66)..(66): n = unknown
  misc_feature (73)..(73): n = unknown
  misc_feature (145)..(146): n = unknown
  misc_feature (148)..(148): n = unknown
  misc_feature (202)..(202): n = unknown
  misc_feature (211)..(211): n = unknown
  misc_feature (223)..(223): n = unknown
  misc_feature (244)..(244): n = unknown
  misc_feature (280)..(280): n = unknown
  misc_feature (287)..(287): n = unknown
  misc_feature (290)..(290): n = unknown
  misc_feature (293)..(293): n = unknown
  misc_feature (296)..(296): n = unknown
  misc_feature (303)..(303): n = unknown
  misc_feature (335)..(336): n = unknown
  misc_feature (362)..(362): n = unknown
ttttttttttttgttcattttgtntgaacttaagnatatatnttnagggaaatttcaatttaaatnatccgcnatatatcatacatgtaaggcaataatacataatttaattaacgcattaaatttaactatgtaaattatgtanngntgatttatctacaatgtttttaacataatatatttaaaaattcatggaaaaatntatctaaanagctaaatatantaaaatggaaagcctgcgctntgctttagcatatttataaatagcatataataattnataatanatnctntanttagganatcattgataatcatttattcttgtattacgnnaatataatagtaaattacaaatgttngg

SEQ ID NO: 1254 - DNA, 318 bp, Ctenocephalides felis
  misc_feature (33)..(33): n = unknown
  misc_feature (62)..(62): n = unknown
  misc_feature (278)..(278): n = unknown
  misc_feature (285)..(285): n = unknown
  misc_feature (289)..(289): n = unknown
  misc_feature (292)..(293): n = unknown
cttaaaaaatcgccccacaatagttaaaggcanttggacgatagcaactaaataacataaanggtattatataaagattccaatcaattatcatcgtcaccgtcgtcgtcagccacaaagaagaaaaccaaccagtgactgatgatccaacacgatgatgatgatgatgatgatgatatgtatatatgtaatgttttacggtgttaatttactattatcggacgaatcaagattttatttattaagatatgggaaggtagtcacaaatattttttttnttaaatngatngtnncccattcccaaaccaaaccaaacca

SEQ ID NO: 1255 - DNA, 312 bp, Ctenocephalides felis
  misc_feature (33)..(33): n = unknown
  misc_feature (63)..(63): n = unknown
gtatttgttaaataaaaataagtcacatcttanttctgccaataatattaaaaatgcaacatntatccagatgcaactaactgaatatcactttcaacaactcaagacgtacagatgttacgataaaaaaacagcccacaataaatccttgttgcatattataaaatagatgcttccacattggtaataaggctaaataaaatccaacatcacccagaccaggatatgatttgaatatagcaattaaagctgcgagactcgttgctaataacataggctcatgtttgagacgaagagagagcggaagcaagt

SEQ ID NO: 1256 - DNA, 135 bp, Ctenocephalides felis
aaaaaaagttatactaaaaaaaatttacttgactgagcacttagtacaaaaaagttatactaaaaaaatttactcgactgagcacttagtacaaaaaagttatactaaaaaaatttactcgactgagcacttagt

SEQ ID NO: 1257 - DNA, 500 bp, Ctenocephalides felis
  misc_feature (31)..(31): n = unknown
  misc_feature (59)..(59): n = unknown
  misc_feature (448)..(448): n = unknown
tcaaaaagcccttatacgattcgtatacacnttctttaaatgttcgctatatatttatnttccagtaatggttttaataaaattatgccgatctacattttctaaacatcggcaaaattaaatcacattataatgttaacctttcaaaaaaatactgtccaaaaagtatcacactttgatctacaaatgcaaaatggttgaaatcaagtgaagcaatgtcatttatacatcaaaagccaatttagagtcacttgtgttcacccactttgtttataacatcgtcaatcaaggcggataacaacagtgtttattgtaaataaattatttctaataaattgacaaaccatcgggtaacaaaacaaaaaagttaatactgcttttcagctttgtgatggttaatggttatgctcgaataaagcattgactgtgccatcaagaaagtatactngtttccattagtatttcgatttattccaattccaatcatattatcacaaata

SEQ ID NO: 1258 - DNA, 485 bp, Ctenocephalides felis
  misc_feature (33)..(33): n = unknown
tacttttactttgtaaaatgtaaataataggantcactgagacttaaatgatccattggtattcatacaagttaatgatatctgtgaggtatttaacgagcaaaattattttgattcttaagaagtatgatgtttatagccttcttaagaagttatgatactgttatagccttcacactttgagaaagataatagaaattgttctcacataaatattactcattagcagtttaacttaaaaatgaaattcttattcaaatttgaataaaaaaaagttgcatcaaagtatcacagtatacaacaatattagaatcgatatcataaattgtgccaacattctgtgttgccactgatatcattattcatttgaaatatcaatggaattatcaactgaatagagaagtatttggctgagcttaatataatactaatagcgagatctgaaattaacaaagttgaaaactaaatagtattattttattagt

SEQ ID NO: 1259 - DNA, 232 bp, Ctenocephalides felis
tgtaaacagcactttgcctttgtaggttttatcgaaggcttcgctcaaggttttgatggctttggtgagttcagttttggctttgtcggtttcttcgggggatttgaaatttgttgctaagcggaagaagaataagctaggacgttcatcaggggttagttctaagactttgtcagataaaagcgttgaggacaccaggtctttcacaaacttctctggtaaatcactttgt

SEQ ID NO: 1260 - DNA, 371 bp, Ctenocephalides felis
tactttataaaaaaaaaaatcaaatctagaccaaccaatgatgagagtatagcgcagcaccattcaatggtaaaatttatattttagaaaaaattacttaaagaataatattgtattgctcttcagatttatcttcagaaatctaaatatattttgaaaatagcattgccaaaacattactagccaactatttcaatagtcagaaatgctattttcaaatatttaagcaatatgcaagttatttttttggaactgataagttcactcagtcaatttcccgatttataaggtttcaatatcatttgttaacttcacttaacttttaatctgtatatgaatattctgcatatctttctaatcatctttgaagt

SEQ ID NO: 1261 - DNA, 401 bp, Ctenocephalides felis
  misc_feature (78)..(78): n = unknown
tatctgtttgatgaattactagttctgctttgttctctactggttccttcaaatttgaatatgtcaaatttggtgtanatcctagtgtgttattacttattccttgattgtttgaaatctcaataatttcgattttatccaaacttttgtcacagtcaaaatctggtaaaatctcttcataacgtttgtgaacataagaatcatgatcatcttttggtttataattaataatcgttctttggtttatttccttgtaagcaaaattattttttacaggcggcgtttcgacgtcgttatattttgcattgcttaaaaagcttgtatcgacaaaatccggaattgaatgagaatttaacgttgcgttgtgagatgaatttacaaaaggttgatacacactttgt

SEQ ID NO: 1262 - DNA, 498 bp, Ctenocephalides felis
  misc_feature (31)..(31): n = unknown
  misc_feature (33)..(33): n = unknown
  misc_feature (61)..(61): n = unknown
  misc_feature (160)..(160): n = unknown
  misc_feature (290)..(290): n = unknown
catcaccgagaagaactcttcggctacggantntcttcattggaggcgcgttgttggtgcncgcagcattacttttggatttagaaataaattaattttggattaagaaaaaaaaaattaaacataaatataacgatctctctacaaacccatataagtnttcattttgattcttttagcctttaactttattttatatgaaaaactcatatttcttcctttgcatcggaggctttacatttagataaaagaaaacagattatttgacttatttaaagaaataattatanttcagaaaaagaatatttattacttttattatattcattaccgtttattatgattggttttaccgagccaaactgataataacatgcatgtatatgcttatatagtcgcacagttttttaacattatctattatttagtcgttaaattttaataacatttatttatttatataatttagcgccgcaatctctaatcaaaattacgtga

SEQ ID NO: 1263 - DNA, 452 bp, Ctenocephalides felis; identical to SEQ ID NO: 297

SEQ ID NO: 1264 - DNA, 490 bp, Ctenocephalides felis
  misc_feature (75)..(75): n = unknown
tttttttttttttttttttttttttttctttactagatgtctttattcctaatcccaaaatattatatgtcgagngtcttcttttatcagaaggatcgacatccttcaatgcacttttctttccaaaaatgcttaatcttttagttcttaatttttcagagttatgagaatcatttaagtcactgttgattttttggttgatttcattaatactggctaaagatctgcgacgcatagaatccttttcggtatcatttagcaaatgaatgccatttggagattcgttaatatacaaagtagccattgttttggctttgaaatatcacttattgttatatatcacttattagtttacaataacactggtaaaacatagcattataagtttttggttcacattttcactcacaaacacgcggtcagtatccgcgcgagtattgtgaaagcaacagacgaaacactgcggttaaatgtcacacggtgttttcgt

SEQ ID NO: 1265 - DNA, 498 bp, Ctenocephalides felis
tctagagatattttagttgcagttctgactgtgattattttaatatgtcttactttacctgctgcatttataatttacaaatatggcatatacgactggatttgtagaaaagttaatggtaacagaatgctacctcgatatgaggatgtgatgatagggcaagaagatactgacgatgatcccttgccataagtgaatattataattttatattttcttgatctccttacaatgatgtagaatattgccttcaagtcatatgttgtaaatagttttacaaaatgataatgttatttatctattgaatatatgtatgtttatgtaatttatttaaatattaatttattaacagatgatgactagaagtcacaattgtgttattgaagttgttgcatgtaaatgaattatttttaaatagatatattcaaataacatgaaataaattttgtatttgtgattggtgaaagtgatggaaatattttgttgaatacaagcata

SEQ ID NO: 1266 - DNA, 311 bp, Ctenocephalides felis
  misc_feature (311)..(311n = unknown)
aacaattctttgttttaatatcgatatataatcacgattttagtttatgatatctttatctgggctcattgtgaagatttcataccaaaatcgatattaaaatattgataacttcaataataactgtaatttccatagatatttgcaagataatcgataaatctatcaatattatcgataaatatattttcccccttttagtcgaaagtattatatagattctattaacacaaaaacacacagacacacaaattagtttaagtttagacgacattccggtgaaaaaaaaaaaaaaaaaaaaaaaaaaaaan

SEQ ID NO: 1267 - DNA, 453 bp, Ctenocephalides felis
  misc_feature (75)..(75): n = unknown
ggccccgtaccggaagtgtgagctggcacatttgacttaacttcatttttatcttcatactcaattatattttcntttaccatttctccagcagaaggtgtcacattctgtgtttctaaatttgtattttgataatcatcactaaatctatttcgggatcgagaccgcgatctgcttcttctacctcttaattctttccttgtaacaaactccaaaaatccttcagaatctggcatcacaacaggttcttcaggttgtgaatccgcttcttgcacgcataattggaaaattggttgtgttttgggtgttccagctgaatgtttttcaaaaatattcgattccgtgatttgtggcacttgagaaggcaattcgctattagctttgataccaacaatagacgcccatgatgtcagttttggttggtcaagtagactcacatagcggttgttcagt

SEQ ID NO: 1268 - DNA, 498 bp, Ctenocephalides felis
  misc_feature (30)..(31): n = unknown
caaaggggcaagcaccacctgggaaatttnnaaatgcagaattgatgaaaattccaaatttcttgcacttaacaccgcctgttataaaaagacagtgtgaggcgttaaaacagttttgcacacagtggccaaaaggtttagaatctgaagaaaaacaaaataaacattttcctgttacagtaattagttctgattattgtcacagcggtccgactataagaaatccattaggtagaattgttactttgaaggtcaaattatcggatttaccactagacaagcatgctcgggataagtttttacggttagttggtgacagacacgatcctgatacagatatattaacattagtagttgatagatgtccactgaggaaacaaaattatgactatggcatgtatttgctgacagctttgttccatgaatcttgggtcactgagccttgggaagcagataaatctgaggcggatatggaatattacgattggcaaaataatg

SEQ ID NO: 1269 - DNA, 285 bp, Ctenocephalides felis
  misc_feature (59)..(59): n = unknown
tgctgctttctgctagtgaggtatttgctgtttctaatggagtatttgttgaagtattntggcttaagggttgtgattcggtgaggtttccattgctttcattcacgtttgaacttggagcagttgtggatgggcttatttcatcattcgttgactgtggttggtcgtctttaacgtcactgtctgggaaagcaatagtaaaagtatgattatgagtgaatatttatttgctcgactattattattatcttactaagcaaacgcctgggcccagggtcagtctgt

SEQ ID NO: 1270 - DNA, 498 bp, Ctenocephalides felis
tagagcctttccaaaaagttgttactgaggaagatttgataatgcgcctagaaatagtagcttgtgattcaacttgtgcaaatgtaagaccatgtgagctggctcttgttttattatgcacccaacttgatagctgtgtgtctcaattggaatctcatactgctcaaacgatgcttaaattggttgattttgctattcacatgcagaaacagtgcaggattcctgactccagcttcttcagttgtcacggttgtgttgtcaacatactgtcgaggtataacaatcaagataaaagtccacacaggcaaagacttgtttggaaattatcttcgcgcacattgaaacttcttcgaccaacagatcgtcttacatcacttctgcccactattgatgaaaatggatgtctaccaaggcttagaactggcagtgtgagttctgtgggcagtgaagatactgaagattggcccaccagtcctcttggtcccgttgtgagcaatg

SEQ ID NO: 1271 - DNA, 500 bp, Ctenocephalides felis
  misc_feature (5)..(5): n = unknown
  misc_feature (11)..(11): n = unknown
  misc_feature (14)..(14): n = unknown
  misc_feature (19)..(21): n = unknown
  misc_feature (23)..(25): n = unknown
  misc_feature (28)..(28): n = unknown
  misc_feature (33)..(34): n = unknown
  misc_feature (40)..(40): n = unknown
  misc_feature (42)..(42): n = unknown
  misc_feature (52)..(52): n = unknown
  misc_feature (54)..(54): n = unknown
  misc_feature (65)..(65): n = unknown
  misc_feature (75)..(75): n = unknown
  misc_feature (84)..(84): n = unknown
  misc_feature (87)..(87): n = unknown
  misc_feature (94)..(94): n = unknown
  misc_feature (96)..(96): n = unknown
  misc_feature (100)..(100): n = unknown
  misc_feature (102)..(102): n = unknown
  misc_feature (109)..(109): n = unknown
  misc_feature (114)..(114): n = unknown
  misc_feature (116)..(116): n = unknown
  misc_feature (138)..(138): n = unknown
  misc_feature (155)..(155): n = unknown
  misc_feature (170)..(170): n = unknown
  misc_feature (200)..(200): n = unknown
  misc_feature (204)..(204): n = unknown
  misc_feature (207)..(207): n = unknown
  misc_feature (210)..(210): n = unknown
  misc_feature (214)..(215): n = unknown
  misc_feature (224)..(224): n = unknown
  misc_feature (257)..(258): n = unknown
  misc_feature (340)..(340): n = unknown
  misc_feature (362)..(362): n = unknown
  misc_feature (384)..(384): n = unknown
  misc_feature (386)..(386): n = unknown
  misc_feature (406)..(406): n = unknown
  misc_feature (415)..(415): n = unknown
  misc_feature (418)..(419): n = unknown
  misc_feature (421)..(421): n = unknown
  misc_feature (429)..(429): n = unknown
  misc_feature (434)..(434): n = unknown
  misc_feature (437)..(437): n = unknown
  misc_feature (446)..(446): n = unknown
  misc_feature (451)..(451): n = unknown
  misc_feature (453)..(453): n = unknown
  misc_feature (467)..(467): n = unknown
  misc_feature (487)..(487): n = unknown
  misc_feature (491)..(491): n = unknown
  misc_feature (494)..(496): n = unknown
  misc_feature (498)..(498): n = unknown
ccaancggttncanttggnnntnnnccnatttnnaattgnangggcccgggncntagggggtaantttaattggnatttgggcnttncatgacngngcantnagcttcntgacnanttctttttacacatatttttanaatgatcatatacatanttaggtgggcattcnaaaacctgacctttaccatctttgcagaanaagnatnttntgcnntcttttcgnatctggctgatatcctacaaccgccgcatgtannttctgccgtcttacagctttccccaggtttttgatgagcacatattattctacacaaaatgggaaccatttggaaatttgantccttcttcaaattgattgtangaaatttgggggtttctttgcncnaccccacaaactttaaaagnaaaaacaanctnnanaaaaaagntcccnacntggttattnaaatncnttgggcccgtaccncccttaaacccaattttgtnatantcnnnanaa

SEQ ID NO: 1272 - DNA, 157 bp, Ctenocephalides felis
  misc_feature (28)..(28): n = unknown
  misc_feature (32)..(32): n = unknown
  misc_feature (36)..(36): n = unknown
  misc_feature (52)..(52): n = unknown
  misc_feature (79)..(79): n = unknown
  misc_feature (113)..(113): n = unknown
tttttttttttttttttttttttttttngatnggtngaactttgtcactgantataatgtcttttgtcacttttattanaccaatatcagcatagttgacagtaatttttggngtatatttatgatgcatcacaaaacgttcgacgtcgtagtatgt

SEQ ID NO: 1273 - DNA, 235 bp, Ctenocephalides felis; identical to SEQ ID NO: 430
  misc_feature (60)..(60): n = unknown
  misc_feature (62)..(62): n = unknown

SEQ ID NO: 1274 - DNA, 400 bp, Ctenocephalides felis
acatcaagcataattttcaaaaatggtccaagaaaccgaatgcaaattaaatggatcctcaaaccccgaggaaactaatgtgattcacggtccagccgcgcctgccaacgaaggtttgaggggctttggagaggaaatttatgacagaatagttttacatggcgatagagtatccatgatcgacggagacaccgatcgctccaccaccttcgacgcccttcgggcacgcagtgcagcaatcgctctagccctaagggctcgtggagtgaccaacaaagacgtcataactttggtagaactcaccacagaagactcttttgccattgttttggggataattttctcaggagccactttagggatgttggatggagcctggacagtcccaaacactgctagt

SEQ ID NO: 1275 - DNA, 343 bp, Ctenocephalides felis
ccaggatataatttgtgagataattataaactattgtaaataaaacataatttaattattggaaaaaatatttgttaaatatttaggataagattgctcaagtcatacccaggatataatttgtgagataattataaattatattatctgctaccattaaacttaagttattgttaaacaaaactaataaattgtgtaagcaaacgtttttaattggtagactggtcaattttatgaaacaaaaataattaaaagtttggtaaagtttctgctaattttttttgctcaattgtaagcatgttaagtaaggtaggtgtctgttttaataaaaaaatgaaattgt

SEQ ID NO: 1276 - DNA, 204 bp, Ctenocephalides felis
ttacgaattgattttagagcattcaaatcggatgctctgttctctcaaaaacttaatttttattttctgcactctttgcttcgtatcttcgaaatagctggatcggcctttgccaaaaactaatcagcacatctccctatcaataggaatcgaatttttttttgaaccattcaaattggttgatccgtgcgtccgaaaacgtgt

SEQ ID NO: 1277 - DNA, 150 bp, Ctenocephalides felis
ttctatttgttgggttattttatttcagctatgaattatatatctttattatttaattaagttttttaataatctctttgaaaatattgataaaatgtaatagaaaatacaaaaattttttgaaatatttagcttcataaaaaattccgt

SEQ ID NO: 1278 - DNA, 337 bp, Ctenocephalides felis
  misc_feature (3)..(4): n = unknown
  misc_feature (33)..(34): n = unknown
  misc_feature (69)..(69): n = unknown
  misc_feature (128)..(128): n = unknown
  misc_feature (155)..(156): n = unknown
  misc_feature (169)..(169): n = unknown
  misc_feature (191)..(192): n = unknown
  misc_feature (212)..(213): n = unknown
  misc_feature (263)..(263): n = unknown
  misc_feature (274)..(274): n = unknown
  misc_feature (301)..(301): n = unknown
ccnnttcgaaagtgttaacttatcggatgagcnnaagctttactaattgaattgattgctagagcttgnaaaaatattgcagcagaaataaattctcttaaagcgttagcttacatgttgaagttcantacctctcgataacaaaagaaaatgcnnactacgttaaaantattcaatttttttaaaaaaanntgggttgtttgctttctganntgtgctcgttgggggcccccctggcgtgggggccccgtatttttgatacngctgatacggnggtaagttacgcccctgatctgcattnatatacaaattttaatttaaaaaaaaaaaaaaaaaa

SEQ ID NO: 1279 - DNA, 549 bp, Ctenocephalides felis
  misc_feature (167)..(167): n = unknown
aatttatagttgtgtaaaatatttttttaacaatcggttcaggaattaatgtaacgttcaataactaatacgctgacaagcggatcgatttaaaaaacgcttgggcacatatgatttttggattctaggaatcaaaataagatactttgctcaagaaaccatacgtntaaagtgaattctggttaatgaaacgttccgttttcacccatttcagctgatggtaaattggacaatgacactactagctctgaacaaaataccaaattaaagaccgtagaaaaatgcaagttacctgagaaactggaggcattaaccatcaaattgtaacaggagtagttaaaaattaaaaaaaaatgttatatctatctaagattttttgtgaaacgaaaatcgattatgatgaaactcagttgctcttgtatacttatgtcgattgatatacaattctgtacatacataatatgaaattatccaaatattaaacaagtgcaatttcaattaaaaataataacgcaatattcatgtcgcttcaagtcaattcattactga

SEQ ID NO: 1280 - DNA, 549 bp, Ctenocephalides felis
  misc_feature (34)..(34): n = unknown
  misc_feature (390)..(390): n = unknown
cgctgttttaatgagcggcgcgataaaataaatntgttgaatacatggctattttaaaaatcgtttttatatgaaaattaaataaacactatatattttgcgcttatattgaaacagaaaatactatagttcaatgagttttattaaaaatattgaattattttacatttggagataaataaaatggtttataattatatgatatacgcatgagtaattatgagtttgcgctaaatctcaatcaccactgtgtagattcagctttaacatagccaatccaactgtaaagagagaaggaataaatgataggataaatggcaggaaaggatcaacaaatgcgaccatacatatattccatcataataatgagacatacgtaaataataaggngagggaaatcataatgggattgagaacattaataaaattcaagaaaacttattaaaaattttcagtgtggtgtcttctgtcactctctacaaaggtagtaaatctgaggaggtcgtatcaaggataagaaatcactaagatgaggattttattgcaaat

SEQ ID NO: 1281 - DNA, 549 bp, Ctenocephalides felis
cgggttccgaagaagatgatcaaatgattttcgactctgatagtgatgatggccaaaaaacctcacaggaaaatatattaacaaaaaatactaacaaatggatggacagtttgccagcttttgtttttgaccctagcatagacgctaaacaaagatccaaattgatagaaaaggaaatgaatgaacaagcaaaaatcatccatgacttgagaacattgggtgcatctcaaggaactatagaacatgaaatgagaagactccatgaattggaaaccttaatttttaaagattttcgaagagatatgataaagaaactgcgtcgacaaagtatgcgcacaacagcaatcaaggataagttgggttttggtcaacacagtactcttagaagtcgttacccgactattgaacaaaatattcaaatgaatgggtcggttctcgagacgattgcgagtggcgatatcggcggagatccagcccaggtggccatcccgatctgtttcttaaagtgccgggcagcacgtgttcatttggagatccctacgttcttag

SEQ ID NO: 1282 - DNA, 549 bp, Ctenocephalides felis
  misc_feature (531)..(531): n = unknown
ctgtaggtctgtgttcctcgattctaataaaataacagtgtcattttttaattaaaatgatttaatttaaacaatcagttatgttaattgttagttaaatggatagttttaaacagtgagcaagtgttgaagtgttaagtgaatcagtgcatttaagtgtgtatgaatgaaatagtgtttccatttggattaactggatacagattttactgaagacagctggggaaaatatggcgttctgtcagtttgcaaatgatggataattattaaactaaaggacccggcataatgaaacctgaaaatccacaaaactaccacatgaaaatctaaaaattttagtcaatcttaacgaaaccaaccaaagcaacaaaactatgaaaaatccaacaacatttccgcttgaactgtcatctaaaccgaatctttagatttcgtagttcaacatcaaaccacttcaagacatctttctaatatttataattcacttatacgcttagacaagacaactttctatgacggctcgattgtgtncaaatggttgtaaggcat

SEQ ID NO: 1283 - DNA, 383 bp, Ctenocephalides felis; identical to SEQ ID NO: 342
  misc_feature (4)..(4): n = unknown

SEQ ID NO: 1284 - DNA, 549 bp, Ctenocephalides felis
gcgcatcggagcggttccctaagaaacatctatccgtcaatctatcaaacttgtaaccgttaaaaataattataagagaataccttaaaataaaaggtagttttcgtttaaaatatccttaattgtgaactatgtgataataagtgttttaagatagtgcctatgttaatatttttgatgacgagaacagaataagagaacaaaacgggatactaaaagacaagagctttgtttgacacgacagttgacggagactagaatgcaattgtgattttgaatatattaaattttaaaataattagaaacaaaaatgtcgaccaaagacatacaagctcagacaaatggggatgctgacatacctcagcggcgaccccaacataggggatgttgtagcaaaatgttatatttttttaaagtttattggagaagttttgtaatagtattagcaccaatattattaaccccggctttcttgtaataatgaaccgaaattccggtgatgatgtagttatgtaatgctgatattggttaccgaagtttacctctcca

SEQ ID NO: 1285 - DNA, 541 bp, Ctenocephalides felis
gttgctgtgggtcttttacttttgggtctggtgatcgctggacttgtcaaggccggatttttcaagaggacgactaaagaagaattagaagcacttaaagaggctgatcagagtgcaccaggaataagtgaagaggaggctttagcgcacagccatgatgttgaaaactcatctgaaaaagaagaagcttaaactgtgttgaatgcaatttcaagttgtaaaatttttgtgctttttgtatatagatatctacaaatatttcgcagaagaagtataagaatgtttgagaatatttgaaatcaagagaaagttgtgtcataatcataaacgtatttagatcataagtagtaaacattcaaatatcacttaagtagtgtaaatatgagactgaaagtgaacgattaagcatttttatatttaaagtcatataatttatttctaagattagatatagaatatctgtgatgaataaattccaaacgatatattataaattattaataaatcaattctatataaaaagaaaaaaaaaaaaaaaaaa

SEQ ID NO: 1286 - DNA, 549 bp, Ctenocephalides felis
ccttattgcaggtgtgatagtgaaaaatattattttataatacgagttttattcttgtcaattttaaatttccggtatgcaatatgtatgcattcatacaacaaataaattacccggtgcacaattatgcagtgctgttatttaaaagataatgaaaattgcataataattagaaaatatcataaacatattcattagtcattttgtttttatgtgaaaaatatgtgcataaagttgctgctgaatagaagtcggatttcctcaataatatagaaagaaatggttcaggctgacccaacgtgcagcctctggctggacaaaaacattgacagcagacgaggatctgatttttcccgcctggacttcgacacgagttcaatgtttgaatcgaatgtccagttgtcaagttcattagatgtcatcgactggcaaaaactaaaattccaaacggctagtatcaacagaggatcgctgaggagcaaatcatttgtataattagaccaaaagatacacattaatggaaattcggaggataagggaaagattctt

SEQ ID NO: 1287 - DNA, 549 bp, Ctenocephalides felis
gggccaaggaaccaagccaaaggccaagacctacaggtgcagctggtgaaacctttccttttcctacaacatccatacagaggtccgggcattctatggagcgaccgcgaggggaaacaattaggagatatccaggtacaactggtgaacgccccgccacgccaatgacaagaacaccacagagatccccgggccgcgcccccattaggattataataactccggtcagtaaaccctcggggccgcgatcgcccccaacacgtggcagaatattaagtgctggccatcttgcgccccctacaccggtgtatcggcgcagcgcctctaagggttcttcgcccagaagaagaccagaaaggcccagtgaagttatgcaacccaaaaggagacgtctagaatgaaacatcccatttaattgctgaagagctttccatttattttgagagtcaaccaagaattgcagcagcagcttcgcagcagagataatgtggctccaaaactctgcctagacaatgacaccttcgaattcatttgcctactgaataatga

SEQ ID NO: 1288 - DNA, 384 bp, Ctenocephalides felis
atttatttatattaatatattttattggggtgataggaaaatttataaaactttttttttattaaaacataaataattgaataattgatccataaattatgattaaaagattaagttacttaagggataacagcgtaattatttttaagagaacatatcgacaaaatagattgcgacctcgatgttggattaagataattttaaaatgcagaagttttaaaatttggtctgttcgaccattaattcttacatgatctgagttcaaaccggtttaagccaggttggtttctatccttaattttttaaaattaattagtacgaaaggaccattaatttataataattattttaatttgaataaaattaaaaaaaaaaaaaaaaaaa

SEQ ID NO: 1289 - DNA, 548 bp, Ctenocephalides felis
gaccactgggcttgttctcgaacaggactggcagtcgaacagcaatgattggtttgtagtgtatcgatttttatatcttaacatatgtgtaaataaagtgatatttaattttttatatgtacatatcaaacaaagaataataaatgatggaaattgtatttttgtttttcaattcatatttttttaaacttctgtaatctgccctcgtatgttttattttacatgtacgattctgccaatgcttggtggtcaccacttgtctgcaatgaataaaaaggaatacctaagaccgtgcgtgtttcgacttgatccagtaaccatcactaatataaacctgccactgcattttaaacaatcgagcggaatcacataattacggtaccatttgcaagcgtttttacatatgaaaggaaactgtttatttaccataggcatgttagacataaggtagtaggattaatcgtgtatccccagagtttactgcaaataaacttttggcaccacctcaatgagaagcaattgacttcacttgcgactagtttggtttc

SEQ ID NO: 1290 - DNA, 549 bp, Ctenocephalides felis
ctggttttgggtctaacagtattaatcgccatcgtcagtggacttgtaacaggtgtggtcctgaaatatgcttgtgctcaagttgaagaagaacataggcacgacgattctccagcatgggaattacctcatgatgaagaaaaggcggaaaatcatcatcaaaatgttgctacaattagctgaatatttgttctaactatattgtatgagactgttcgaaaaatgaagaaagaaagtgaagcacaatttaaataattttaaaaatactaaaatatctattaatgtagttttagtgtaattactgtgctttaaacacaatatttgattttatattgatttataaaaaatatgttttaatataatgtcataagaaacaactaatttgccaaccaatttgtcaattggttgaatagaatttaataaaaattaatgtatttttattcaaaaaaaaaaaaaaaaaaaactcggaaatatataggctttcgatgttgatgccaaaacagaccggtccaatctacgagcccttttaaggagggagtatgggccaag

SEQ ID NO: 1291 - DNA, 549 bp, Ctenocephalides felis
  misc_feature (471)..(471): n = unknown
  misc_feature (532)..(532): n = unknown
gctttttcgataactcaatttttgcttcaagtaagcttaagaatttttgaaaagcttgtttgagtcccaagtaagcttaagaatttttgaaaagcttgtttgagtcccaagtaagcttaagaatttttgaaaagcttgtttgagtcccaagtaagctttcgaaattttagaaagctaaagttaaaatttttgtttcaatgtttcaatgtttttgaatcattcttatcggatgctcctttctcttaaaaactgcaattttttcacttgttgctccgtatcttcgaaactgctaaacctgcctttggcaaaaagtaatcagcaagccagtacaaatcgaatgtttttagaatcacgctcggaatcgtagacgaaaaattttatccaaacacacacacatacacatacattcgatttttcttcagtatgccataaatttataaagaagaccttgactcactatattaaaaatgncatgtgagatttttgccttccctaaagaaggtgtaaaattaggaatttatcatattcttancagagcgcccttactga

SEQ ID NO: 1292 - DNA, 549 bp, Ctenocephalides felis
atacagcaagcaatcggtgccagtttgtctaaatacccaggacctgaagaaacttttgaggctcttcgaatattttgcagaggagacttcttaaaattgactctaggatcattgacaagtgtgtgcttcaaaacaaatcaaacaaaagctttgaaattcctcaacgacaactttgatcaacctgtgtctgcaaagaaacacataataagactcatcaacgccatcggtaccaaaaatgtgattttgaaaatgctgaaacaactctgggattgtgagaagcatccttctatccgtaatgttttaataacgtctgtcttcaattggtttgcgagtgatcccgatgaggaaatatggaatttgttgaaatctatatttttagatctgacgaccaaggataaagatatattcaccatgcttctgagtttcgccaagtcgacaaggattatttaaaggaacatattgaactttgtggaagacgcaacaatttggagtccaggataaaatcaatttggatgatgagaagtctaaaatctgcacgcgtaacgaaga

SEQ ID NO: 1293 - DNA, 549 bp, Ctenocephalides felis
  misc_feature (432)..(432): n = unknown
gtgaagtgatgtaaagaacgtatcatttttttattacttttattgattaacaagtgtttgatttcggtttacattaaactacaatttattgacggtcgtggcggctcgccctagtgaaatttttgagttgaaccccttatatgtaacactgatactgcacttatatttattgatattgtctgtatttttacattttgtgttcattattaaaacttaaaaaatgaatgtcgaagttacgccgaactattcttacgtctttgatttcgaaaatgaatttattcatcaagaaacgagaaattggatgactaaaaattggacatggggcttttattattgtggaatctacatgcttgtaatttttgggggacaacattacatgcaatcacggccaagatttgagctccggggccttctgacagtatggaatgctgnctagcaatgttttcgatcgtggtgcctgccggacagctctgaacttctcacgtgctgcgcactacggattgtccatagcgctgcgaccaagcttcatcgacaagacggtagcggttt

SEQ ID NO: 1294 - DNA, 549 bp, Ctenocephalides felis
gtaaaatatttcaagaaacctgagccaattccaaattattgtgacacaagtgttaagagttcttctctttcatcgagtcgagaaagtggtcagaatggatctaaaacttcagcaggcagcagaagatcatcattaaaaaagaaggaagtaaaaaataaaaaagattccaaacggacgagtttgtcttcttaccaaaccagctctgaaattttgagaactgaaagggaaatattgtctcaaaacttggaagatgttacctctccgctggaaactttgatcgaagagccgctaaataacgatttaaaaggctctaatcaaaatgatgcaccacaacacgtgtttccggattctcttgaccaatctcatatgtcgtctttagaacctttacccgattggaaacctgttatttcagatgaagattgtcgatcactttcaaaaatggtggatgtatattggacgagtttcagaaagggtatggaaggcaaggttgtcagatggacaatggaacatatatcaaattatttagggagaattttgcaatcttcaccc

SEQ ID NO: 1295 - DNA, 547 bp, Ctenocephalides felis
  misc_feature (1)..(1): n = unknown
  misc_feature (6)..(7): n = unknown
  misc_feature (39)..(39): n = unknown
  misc_feature (57)..(57): n = unknown
  misc_feature (99)..(99): n = unknown
  misc_feature (105)..(105): n = unknown
  misc_feature (111)..(111): n = unknown
  misc_feature (116)..(117): n = unknown
  misc_feature (121)..(121): n = unknown
  misc_feature (131)..(131): n = unknown
  misc_feature (136)..(136): n = unknown
  misc_feature (141)..(141): n = unknown
  misc_feature (151)..(151): n = unknown
  misc_feature (155)..(155): n = unknown
  misc_feature (162)..(162): n = unknown
  misc_feature (170)..(170): n = unknown
  misc_feature (176)..(176): n = unknown
  misc_feature (190)..(190): n = unknown
  misc_feature (192)..(192): n = unknown
  misc_feature (198)..(198): n = unknown
  misc_feature (254)..(254): n = unknown
  misc_feature (278)..(278): n = unknown
  misc_feature (305)..(305): n = unknown
  misc_feature (312)..(312): n = unknown
  misc_feature (314)..(314): n = unknown
  misc_feature (316)..(316): n = unknown
  misc_feature (330)..(330): n = unknown
  misc_feature (447)..(449): n = unknown
  misc_feature (451)..(451): n = unknown
  misc_feature (479)..(479): n = unknown
  misc_feature (497)..(497): n = unknown
  misc_feature (500)..(500): n = unknown
  misc_feature (504)..(504): n = unknown
  misc_feature (507)..(507): n = unknown
  misc_feature (515)..(515): n = unknown
  misc_feature (519)..(519): n = unknown
  misc_feature (532)..(532): n = unknown
  misc_feature (534)..(535): n = unknown
naaatnnatgtggcaaatgaaatgagtgagaatcgttgnttaaagcattaaatcgtntaattagttatttttttgtatattgggcttgcgttttaacgncccgangatctnatttnnttgnacaataaaantgttnattgnttaacattancaanttaaaantatctgantcttgnctttaaaatgacantntgtatnggtgctggtacgtggggccaaagtgtttatggtgcaatgcgcacgttaatccattntattgcggcaacacaatattggtntgcttgttactatgattggaattttgnacacgtncngnagagcgttcatgtnatgggtaatccgttcggtggaaaattcaaatatctgacatttattgatgccgatctgcaagccttatatttcactgtttgtgtattaaatgactttgctggatcaaatgaaactcgnnnangctaaatccttctgcagtctgaaagacncatgatgcagcattcgcnttnctgntgnatgaatgnggantcattttggaccntnngctttgacaggc

SEQ ID NO: 1296 - DNA, 549 bp, Ctenocephalides felis
  misc_feature (4)..(4): n = unknown
attntaattaaccataacttattgttatgttaaatctttaaataaatcttatttaattatatttatcaattatttataagaaacaattttaaaacattccttcattattataactgggatgaccggaatgaaaatgttagcacctactttgcatttttcacatgataactagcaatcttgtgaggaattgtattaggcctcagtaacccatgaagcgcccttttgtaacacaataataatgattcatccttttctactggttctagataagcttgcagaggataacacaacttttcttcagggcaatttaaaactcttaataatccagaatgttctgaccaaatttgctttctccaacaaatgtcgtggcaatgtgctaacggaactagtacacaagctgaaaacatttcatccccataactaacagcttgataatgtccagaagttttgtatatagatcagtaaaactgcttagaccttgtatggttggtaaagcaaacggtgagtaggccaatttgaaattcttcgaaatgctttagcaacagaggt

SEQ ID NO: 1297 - DNA, 464 bp, Ctenocephalides felis
  misc_feature (3)..(3): n = unknown
  misc_feature (33)..(33): n = unknown
tgnaacaccacattagcaaattcacgaatattngagttgtggacaaactattaagaaaataatgattaattatttttatcaagattctttaatttgatactaaaatgttttgctccacaaaatgactaaatatactttaaaaaaacaactgactagaatatattgaaatttacattcggatatatttaaatacttactagaccacaaaaatatttgtcaaagtttgtcaaaaatattttgtatatattttcttgaatatcgacagtgataacgctggatttgtgctgcctggtagattttttcttgaaaaggtgatattactcctatgatttgtatttatatgaaagtgctttatattattttaatgattataaataatagtatgtatgggatattatataattgtgtatatcgatataattgttgcctcaataaaaaatatttttaaaaaaaaaaaaaaaaaa

SEQ ID NO: 1298 - DNA, 547 bp, Ctenocephalides felis
atgtgtttattattctaacgaacatgcacagtgattctaatttatatggtcataaaatgtagaataaataaacaataaattctttgataaatatagtatttagctttagtatccacgtgtcactaataattttacaatgcgcatgagtccgaaactgataaaaggatgcggtataaacaaaattccttcagtcacgcggtaacaattgtcagaataacactttaatctcattttttgatgtgaattactttgtaattaatcgcgtattctacaaatcacgatgaaagttaaggacttgacattcattagagaaagacttacattcccattagttttattatggcttatcgcatttcctgttcgagctatcgaaccaaatgaaattctttttatcatcctgagtcaaccaaatacttatagttcaagtttagctgaaagtctgcgaaaggatattttaagacaagccatcgatctgaataagacgccgcaataatccacctttcacacctggattatccgcagcatcttcatggccgtctccttattg

SEQ ID NO: 1299 - DNA, 549 bp, Ctenocephalides felis
  misc_feature (524)..(524): n = unknown
atataaagcagacacctcccgaaaaaccgcccgcctatgaactgtttgcgccccctgcctatgaaacggttgtgaaaggggcagacttaaatggaaagaacaaaggccctgaatgcactgtttttactataagttagtaaaaaacgagtgaagtaaggctacctgtttatggccaaatcaaattaagatagaagaccaagagtcttttgcactttggagttacttgtggtgttcagcatctggtggactgatttggccatttgcagggcgctgagccgagagataaaataaaaaatgtgtgactgcaatgataaatgtttatcaataacttatccagaaagattatttaggatctttattgctgcaaactttttcaaaagcgaaagaaactctggaaaatcattgctaatttatctctgtgatataataaattattattcaataattatgcttgtagttttttcttataaatatgaattagataattaataaatataagtaactgtagtattattaaagtcttntttattagcaaaaaaaaaaaaaaaa

SEQ ID NO: 1300 - DNA, 549 bp, Ctenocephalides felis
  misc_feature (4)..(4): n = unknown
gaanaatgaatctctatctagtagaagtattactactgacgacttggaagctgctcgaaaatacatgtctagcgaatcgccaataaggcagggtattgagggacgaatcacgttcatcaatcttggcgatcctaattcatcagttaacctgcactcatcaattggaatgatatcatttatattctttattgtcttcaaacatttttgtaccttgtaataaaaacatgtatatttagattaagcaacaaaatgtaaatctatttttgtcacaaaagacattaaccagtaattaatatgaatatttaaatatttttattagtactccaaattataaatttgtgacttgaaggtttaaaagtaaaacaagaactttgtgtgtgatcaatcactttattaagaaaatatttgtttttttgttgtcatatggtgctcgctatattgtaatcaatatgtatttattgattagtatatttatcacttatttgtgctaattattgatcttatgatacatataatagaaatgaaaatggttcacaaatctcattaatt

SEQ ID NO: 1301 - DNA, 320 bp, Ctenocephalides felis
  misc_feature (232)..(232): n = unknown
  misc_feature (258)..(258): n = unknown
  misc_feature (261)..(261): n = unknown
  misc_feature (303)..(303): n = unknown
gtgcatacgcgttacatatcaaatgaatatgaattttaattactatacattattatttgttttaataagcgcgccttacataaatagcgccaaattcacatgtctcacggatggcgtgaaaaaggaaacatcttgtgcagcagattcatgttttcttttatacaataaatataaaggtgtgcgggagtatggttgcataataaaaatgacgcagagccaaagaaaatactgnttccgtcatccagaattatgctttanctnccaccccgaaaaacctgtaattcaatgaaactgatgaaactntgccgcgaatgcctcac

SEQ ID NO: 1302 - DNA, 549 bp, Ctenocephalides felis
actgggaagacaatcaatcaaaattcataaaaaagttataaaaagttagaaaaatggttacaaaagtagcactgttagttcttgctgttgctgtcgcccaagtttcctgcgatggattaacatggaagtaccatccatctctttcagcatttatgctgaaaggtaaagacgaaatgggtaaagattgttcagctcctggagaaataaagtgccaggattgtgagacagcaaacctttgcattgcgattggtgctgatttcttagaaacaacattggaaacatgtccgagtggaatgacttgcaaaccaggtacaggttgcgttagagcctctgaaaatacattaaactgtcctgatcaaactcctcccgtagacaacagttttgtatgcgaatctattggtattttccctgatctggaagactgtaagaaattccatttctgtttccaaatacagaaggtgttaaagcttccacagaagctttacctcattctgaaattaaaatatgtccatagaagcaatcaaaagtcagaccagagttgcaaaacaa

SEQ ID NO: 1303 - DNA, 417 bp, Ctenocephalides felis; identical to SEQ ID NO: 478

SEQ ID NO: 1304 - DNA, 549 bp, Ctenocephalides felis; identical to SEQ ID NO: 216

SEQ ID NO: 1305 - DNA, 549 bp, Ctenocephalides felis
  misc_feature (4)..(4): n = unknown
  misc_feature (540)..(540): n = unknown
atanaatcagtgttgacaaatggtttgaggaaaatgagaaaaatacctgtcacaaaattttatattgcaaaaaaccaggtgtagaacacatgtaatactagaagaatggttaaaatgcaggtgaccatttcaaaggaatttgaatatgataaaatatgcatagatggaactcatggtacaaatgcttatggatttaccctgcatactcttcttgtaattcatggggcaggttatcaggtagaattttgtttcacaaatcggcaagatgaaactttatttaaattattttttgagaaaatttttgggcaaagtaggaaaaattgccacctcaacttttatgtctgaggatgcacctgcatactacaattcatggtcatctgtcatgacttcgacaaataaccatttactttgttcatggcacatatcaagaagctggaaaagggtacttaatacaaaagtagacaaagaagtagatcacaaaagcagacaaacgttttcacatcttattaagaatcgagtgagatgatttttggctaagtnaatcttatt

SEQ ID NO: 1306 - DNA, 549 bp, Ctenocephalides felis; identical to SEQ ID NO: 372
  misc_feature (474)..(474): n = unknown
  misc_feature (485)..(485): n = unknown
  misc_feature (515)..(515): n = unknown
  misc_feature (517)..(517): n = unknown
  misc_feature (532)..(532): n = unknown

SEQ ID NO: 1307 - DNA, 549 bp, Ctenocephalides felis
  misc_feature (382)..(382): n = unknown
  misc_feature (541)..(541): n = unknown
atttatttcaatacgtgtgaaatatattatatggttaacatatttattcatcttgtttttaaaataactaatttgctatgaaactaatagtaaacaaaaaagttttttatgccggcattaaaccagacaaatttttgtgaaattgaattatttatttattttaaacaattaaacttaataaaaataatttcattttttttaaataattggatgaataaaaaactttttcgtttactgttatatctgtcgccatctgaaatactattgctttaggtgtatataaatatctatttacatattttgcaggtatctgattaatactaatttttgaatcactggtttatttaaaaaatatttcacatttttaggttctaacagcacnacactttgctacatttattagtaaatgttattaattaattatgtataatactttgatttcaactaaaattttgacgcaaattgaaatgtgcttaagtttacaagcagtggccggacgttggcacccatcctgacttggggaggaagacattgtgtacanctcatgag

SEQ ID NO: 1308 - DNA, 549 bp, Ctenocephalides felis
aataaatcattttcaaaatggtgtccaaagtgtttgttgctcttgccatcattggctttataggggctgcacaagcctttttcgaacaagatgccgtcttagataagatggtagatgacatctctgctgaatatgagaacagcattgcaagaattagccaagatagcaaaattgatatgattgccgctgaattcgaaaaacaaggatttgcccctgaagtcgatagagatttggagaggttcaacaaagaagttgaaaggaaacttagcaaaaaagtgagtgaagccgcaaaggaatgccttaaaggccaacaccaaaaagctctaggctacgcacaagaagcccgtgctaaggtcaaggcttgcagagatgacaaacgtgatgaattcaaccaagttcgcaaaatggcttgccgctggagagaagccagggagaacgccgaagccctcagagcacaagccaaggagtgcgttgtgaccgcagccgtgtcgatgaagccagagtttgcttgaaaggggttctccaagctgcccgaagagcaaagacttg

SEQ ID NO: 1309 - DNA, 445 bp, Ctenocephalides felis
attgcatggaagctagactgcaagtatcatcggaaatgtatggtgaagtgttggagaaattcaatataaaaatagagatttttcaaaaaagattagattactatcgtaaaagagcattattttctatgcaattagttcatgatctaacaatatcagatgacaagaacttagaaaatttgtttcttcaatctcgcttattatatttgcaaggcaataacaaatctcatgaagaacttattaagtttattagatctccaagcaaagatgcatattttgctaatggaactagtatattaaaaggatccaacaatgaaaatcttgccatattagctcttaataacattggagttattgaattttctcttggtcactttcatctagcaactcattcacttcaacagtcattaagtagagatattcaactggtaaaaaaaaaaaaaaaaaa

SEQ ID NO: 1310 - DNA, 549 bp, Ctenocephalides felis
atgtatcaagttatattttcttttgtataataattacattcgtttagttaagcaacttgtttctagtgataattgtagaaaagtgtagaaaaatgacacctgcattatatcctgggatgaagaaacgttattttatgtcgatttctttagatgacaaaggaggtaaccaaatagcatatcttacaaaatctgaggacaataataaggatcgtttagcaagtcggttgagaagcggatcgagaatgattgtttgaatataagtcgtacaaaattggaatgaaacgatgaacaatatacagatctttagacaggctcaaataatgtatgtttaggagcaacttgaagataatggagatttatcttcttaatataaaacctctaaaattgggaacagtatgtcatatatgcatgaacttgattgatgtattgatgtataatgaactgaagatagaatgaattcaatcaggttaaaaaaaatgttggcaaaagcgattcgatttagatttgctcctgatataaaacttccagaagtcatcatatatgaatatc

SEQ ID NO: 1311 - DNA, 549 bp, Ctenocephalides felis; identical to SEQ ID NO: 275

SEQ ID NO: 1312 - DNA, 423 bp, Ctenocephalides felis
  misc_feature (5)..(5): n = unknown
aattnatttaaagtcgaaattccaatttgttgtactttataagagtaaagcaatttcactcacatctataatgtgtatacatgtattacatttttattttattaccttggaatattgacattttgaatgaaacattagtaattttgttgtttaaatgctcacctattacagtaataacttgtatgtatgttctaaacctttttaaaatttagaaatgtaacgagttatgtggatatttgtgatctatgctgaatgatactatttagtggacaaaattgcagttctgcattaaccttttggtgagaatcttgcaatccaatattgtgtagttttagtttataatgtacatataagcaaccttaatgtaagcattaatttaatcaataaaatcttttctatatcaaaaaaaaaaaaaaaaaaaaa

SEQ ID NO: 1313 - DNA, 549 bp, Ctenocephalides felis
  misc_feature (491)..(491): n = unknown
  misc_feature (496)..(496): n = unknown
  misc_feature (515)..(515): n = unknown
taatattttattgtaacagaggcaaaatctagaaattatgggatgatttgtgataagtgtgaccacattaatggaaccagagttttaataaacgcattttgaaccacaagtacaatgggatgaacttaataacttctggaattataatcatttataaaggtggactcatttatttgaagctctatgtaaaatcctgctctgattagtataactactgcatttcagaatggaaaatggtgctaagaagcttgatataaacaagtataagctggatgtgtcagatttagcaaagcaaaactaccgacaaataattgaaaataaatatagcagtagtattccaaataaccaagaggtgcaaaactcatcaaatgcgggttccttgatgtctttgacaacaatatctatgtcatcttcagacaatagttatcaattatctcaaaattgcgaaaaagagctagtgcaagaaaattggatatatactattttccagntggtntcctttatgatgctggatnggacataggtgcagtgcatactcacctcgccaca

SEQ ID NO: 1314 - DNA, 549 bp, Ctenocephalides felis
gtcacaatgtgatatttatttttatattttaaaataaggaacatgctggagcaagaacatgtatcattaaatttacccgatattaaggagtccgttactcatagaaaaagcatatggcgttggtggaatcaactgtccagatttcaacgaagtctattttatatgatagtattagttctattttttacactcttatatttattaccaagtcaacataatggagatggaaaaactatagagcatatacaaataacaccaattgaagcaaataacttaccatttttacaaaatgatcaagtggtatcacctattaatttaaatcaaaattcagaaactaatggcttagatttagaaaaatcaattaaagaagtgaggaaaaatgtgattgatgaaccaaaacaccacactgaggcaatctatttaaaaagtagtcttgggactagtcatggcaaagtttttgtggccaaaaacagaaagacagaaagcagtgtgaagccttcaagctgcttggaagggcttaaaacattgctggggcacgccattaaccat

SEQ ID NO: 1315 - DNA, 549 bp, Ctenocephalides felis
  misc_feature (521)..(521): n = unknown
attaaattgaaaacttcatctcctaaatgatggtcaatgttacataaaattgtataagatagtttgtgttaaattttacgacgctttgataatttattaataaacattaattgatatcagagtagagtcaaatcgatatataatattattttacctacttctctggaatacaaatttattaataaatatcgatttcagttacaagctgatcagtagtatattttctgtggtcaaggattgtcatcatgtcaactaaaataatattattatccgcattgctgttgctaatatcttccactgccgtccaggcccaagtatgcagttgtgtatgcatcacaatatgctgcacccccgaacagctttcaaccctcgcctgtccccaagcgcagcagcagcagacggcctgactgtccaaactcaccctcctaaaaataatgctgatgcttacctcgaatacatacaggcacaaaatattttaaatcagtacttacatcaacagcagtgcgacaatccaaaaagtnaggaacaaaaattcttggcacagcagca

SEQ ID NO: 1316 - DNA, 549 bp, Ctenocephalides felis
gtttgcattttcattgtttttgacgcgaaaaataaaactacaatgctgtgacatatatcgttcaagtgtcaaatagcacataaaaccgtatttaaatgaaaaacctctgttaacaatagttggcttgtggttgcctatgtcgtttacctattccccttgtgcaaaccccgggttgtgggaatgtgtaagaaaattagtaaaatgctcggaacgataaaaattgtgcaagtgaaaaatatgttgattaatgtttaattattactgtgaggtgaaattgataattctgtatgaatttaaaattaacggatttcaatatggaagtgactgatagtgatacgaattccagcaattataaggagacgaataaaagtgaaccatccaacacgtctcctgaagacgatgcaactggctgcgaagatgaggacgaggatgagctctaccttcaacttcatcttcatgtaaatctgccaactaaagcctcacttgattcagcatgctcaagtatccagcagtcctcaacgttgaaataggacttccgtcccgaatgct

SEQ ID NO: 1317 - DNA, 549 bp, Ctenocephalides felis
  misc_feature (526)..(526): n = unknown
gtcatattattattgaaatagaaaaactaattgttactaattaactaactgattaattcattgattgttggaataactatctgaaagaacaacgctatggctgacgaagcactaaaattcggccaagatggacaacctttgccaagtggtgaagaattattaaaaatgttagaaggaatggacatgtccgaggaagacaaacagagcctgagggattctttgcttcaacaggcaaatagggctgcttctcaggaccccacgggggctactggggtcacattccaacaagtcttgttcatgttggccatggtggcgattatagtatcagttttcgcattttttgcaaataaattatacaaatctctgacgtacaaagacagaatgcgtgaagaaaaaaggaaagccaaggaggagagaaagaacaaggaaaagaagaaagtcaagtagtcattttgaaaacgacaagacttttaaatccataattattatacttacccatagttcagtcagtcagatcaaaacagtntgatattaaaataattttccgta

SEQ ID NO: 1318 - DNA, 549 bp, Ctenocephalides felis; identical to SEQ ID NO: 438
  misc_feature (526)..(526): n = unknown
  misc_feature (537)..(537): n = unknown

SEQ ID NO: 1319 - DNA, 549 bp, Ctenocephalides felis
  misc_feature (535)..(535): n = unknown
gaaccaccttcaagaactccatatgagtcacagtacgctcgagcatctgaagaagaagatagatcgcaattagtgtttatcatagttacctctttattcttctttatcataatatgttgtatcattgaagtattgcgaacaaattatcaacataaaaagcgaatagaaagagaaactgacgaaagtatcataattgcgaaagaacatgcaactaagctgcacgaatcaccagctgttggcatgaaatttggtggatataaagcggtaccaactgttgaagatgagaagaaaccagttaccaacggaactttaccaaagattgaagaaaagtgtgacagcgttgcagaccttaatggatccataaataaatctttagatcatctaaagccccagaagtagcagttgctgatatcaacacctgtattccagaaaagaataaagacttttatgtggatcagagaaagcagctcttagatcatgaactgcagtgggactcatggaagacaaggatccagcagacgtgatgcagagcggncatacgaagaaacg

SEQ ID NO: 1320 - DNA, 549 bp, Ctenocephalides felis
  misc_feature (537)..(537): n = unknown
atgatctataaaccctcaaattcttaagtaaaactgtaatagtattttaacttataattattagagaatattttatatgaaaaaacatggaatttattatggcaataaagcgtgatgcaatagtgaaaaaaacatctaagtgaaatcagaaaacaacaacaggaataacattttgaatcagtaaaaataacggatgacacttcaagggtgcccagatgaaagggtgacaaccccgtgtccgccgtctccgcccccgattccgctgcagacttatctttgggaggacgttagaagggaacgaaaaaaagggggctacccttggacgcacttcgttaagaggcctttcgatcctgatgctccacaggaaattttggagtacgaccggtccccaggcagtaaacgtaaatacggaagcctagatgttcaggaactagaagagtctccgagtgtcactagaagaagaagagcggatccgtggagagtctttgggaaacgaaccagacttacggtgatccaaacacaggagtaaatcagtantatagaagacaa

SEQ ID NO: 1321 - DNA, 384 bp, Ctenocephalides felis
tactaaaaataattttatcattttcaaaattattgtgcgcatgtatttaagggtaaaatgaaatttttgagttcgattgcgtcacatgtatataagtattattgatgcgccccctagaggggttcagtgcaggtgaacgatgttatttatttaatataagttgcaatgaatgacgttaaaggacttgtggaaagaaactactacttataattagtgaatattatttattaggacgaagtagtttttattgtctccctaatttatctttgcgagtttagttaattcaaaatatatgattttagaattatttgttacttaaaaaaacatgaaagaaatctgtatttgaataaaaagatacacaaacatcaaaaaaaaaaaaaaaaa

SEQ ID NO: 1322 - DNA, 549 bp, Ctenocephalides felis; identical to SEQ ID NO: 277
  misc_feature (537)..(537): n = unknown

SEQ ID NO: 1323 - DNA, 29 bp, Ctenocephalides felis
  misc_feature (6)..(6): n = unknown
tgtcanggcttatcggatacccgtcgacc

SEQ ID NO: 1324 - DNA, 550 bp, Ctenocephalides felis
  misc_feature (508)..(508): n = unknown
ttttaattttcaattcaatactttgcaggatagattttgcgataatgttttattatatagctgtaatgggaaatagcaatcgtagtcacttcatcctatcatcatgtaccatggaatatgagaatattttatgtacttctgcaaacagtttcctgggtgctcctcagcttatattaagtagtaaaatgcagtagatgaggtattgtgaccaaaatttaaaaaaaatatattgcctatttaggcaatatgatatggtaccggcaaagtgtgtttagtacatttcaggtatttttatataaaatttttaaacgtgtacctcaaagagctgcgctatctataatgttccaatgatgtgccgtattgcatacaatgctggtgtttccaaatctttgagaacaattgcattaaatagtgatgtttgaatggatacttttgcggccttatgaacaaatgtgggaattgcaagcaataatacttctagagtagaaattatgctctatttttgtgngcacatcttagactattgagatctagtagattgctgaatgag

SEQ ID NO: 1325 - DNA, 491 bp, Ctenocephalides felis
  misc_feature (10)..(10): n = unknown
  misc_feature (19)..(19): n = unknown
  misc_feature (236)..(236): n = unknown
  misc_feature (427)..(427): n = unknown
atcttaatgnattaagtgnaaattaatataagggaatttaatgaattacattttgaaaatgagagcaaaactactttaggatacattttttgactaaatcatgtaataaatttaccatggcccattggaaaatttttctgatactatcgtggcgattaacgtgttaataattttatagtccctagttcgggttaaaataaaaaaacgtgtctcatatttactattcacctatattnaccacttcatttacttcttgattcttcttctcttccatatccgatcttcttgattcttcttctcttccatatccgatcttcctgattctttttctcttccatacccgatcttcttcattcttcttctcttccatatccgatcttctttattcttattctctttcatatccgattttcttcattcttctttncttctaaatctgatctccaattctgctcttgcttttcttttcatttattcttcgggcatttgtg

SEQ ID NO: 1326 - DNA, 550 bp, Ctenocephalides felis
  misc_feature (459)..(459): n = unknown
  misc_feature (517)..(517): n = unknown
ccacgggatagcagtattattgatgcattgttgagcagtgtacgcgagtgcaagtgaagtattagttgaacaatgtgaaatcatttctagaaattttatgtgatattaataatattgttgtcgtaatggattcagaataatgtaataaatgatctttatttgatgagattattaaaaatgaatattacaacattcacgcaatcaagtaatttagaatcaatccaatcagccaattaacaaaatcgacgaatatttttcaagttttattaatcaaaaccttaaaaagttgataacaagacaaatgatacctacgagcaatcaacaagtatgcctagaagagaccttccggtgatcattgatgactatgaatcctttgaaatcatcagttattcttgatgttttggatgctctatttgctctaacactggttgcgcccgcgtagtcgggtattggagaggnacgtggaatctaatgggacatttgtttatacagataatgaaatatatagcagttcgtncttggcataggcttattggatgttatattttgt

SEQ ID NO: 1327 - DNA, 550 bp, Ctenocephalides felis; identical to SEQ ID NO: 440
  misc_feature (5)..(7): n = unknown
  misc_feature (16)..(16): n = unknown
  misc_feature (40)..(40): n = unknown

SEQ ID NO: 1328 - DNA, 550 bp, Ctenocephalides felis
  misc_feature (543)..(543): n = unknown
ggcaaaagctcttgaaaagttcttctgcgacaagtgctagtgttagaaagggcaaagttggcaggccgagaaggagtagagattaactagtgaaaaaatgatattaagagaacattaaataatatcagacagtgattttttccataaaacaatcgactaatgatttgttattctgaattacttttcagaactgtacattttgtttaaagtttggtgaagtggtgaggacttgataaaattttatttaacaatgttttttattcataggttagtttaaatccatatatgtgtaattaaaatattatttaacataagatttttacattatacaatattatataggatactagcattatttcagtaaatgaaggcatactgcttttgtgattttttaattttatggtcatcatttacattttatatcaagttacaatcgtatgtaaatatttaatttaatatataagattattatcattagtattagaatttgtaattgagtagacaatcagcaaagctgtgtgattcgataaacattttgaatgnaagtaat

SEQ ID NO: 1329 - DNA, 550 bp, Ctenocephalides felis
  misc_feature (532)..(532): n = unknown
  misc_feature (545)..(545): n = unknown
ggaaactcttaaattctctgatttaaaatatgaagaaaaagatcttcatataccatctcttcaggaggtcaaagaagttctatctggaaagttacctaacaatttcactcatgtctctgttgatatagttgagtgccctgatttaaccgcaaaaaccattttgtctcgctgcaccaggtttgagtggaaatcctaatttactcgaactaggtggggctccttatctcttaccacttgttcaaagagaaaaaatatatgatataaaaaacattgctaagtctttggacttgagtccggttttagctataggagctggtgcaggaccatggccatatgctggtgtatgttgtgagggtattttcaatatgcacctagcatctgacggtaccttgaacaacaaaacacacatagctactgttaacatggaaaatagtgcatgcgtacttggaacggtccaaatgatgaacacgttgtgcattattaggaaatctcttctgctgaagacatgccggatctgtttgcgtgtcattgngcactagcatggnctaaa

SEQ ID NO: 1330 - DNA, 550 bp, Ctenocephalides felis
  misc_feature (63)..(63): n = unknown
  misc_feature (251)..(251): n = unknown
  misc_feature (308)..(308): n = unknown
  misc_feature (316)..(316): n = unknown
  misc_feature (330)..(330): n = unknown
  misc_feature (346)..(346): n = unknown
  misc_feature (350)..(350): n = unknown
  misc_feature (360)..(360): n = unknown
  misc_feature (382)..(382): n = unknown
  misc_feature (405)..(405): n = unknown
  misc_feature (409)..(409): n = unknown
  misc_feature (417)..(417): n = unknown
  misc_feature (458)..(458): n = unknown
  misc_feature (476)..(476): n = unknown
  misc_feature (484)..(484): n = unknown
  misc_feature (486)..(487): n = unknown
  misc_feature (500)..(500): n = unknown
  misc_feature (521)..(521): n = unknown
  misc_feature (537)..(537): n = unknown
  misc_feature (542)..(542): n = unknown
gcgcttcagaattatcgtaattgtcgaataaaatatatactttataatacattcacatattgnatattaatagttttaattttaaatttattactaaatagttttaatttttaataagtggtgatacaagatttagataagagcccgatcgtcccggccggtgataacagcgcaacgcccagcagagacttagcatcgagcgccctcgtcggttctcaacccctgccaaatcgaattcattccgaacgcangagacagccactctcaaccctattcggcataggatggtcagactgccctgggcccangcgtttgnttaacaggggccgntaaagacgaccaaccncagncaacgaatgntgaaataagccatccccactgnttcagttaaacgtgaatggaagncatnggaacctnacccgatcccaccttaagccaaatcttcaccaatcttcttngaacatcaattcctcctngcgaagcngnngtcccagtagtgncgacgttatatgtaacaaacncggtcttaaggaagangccgntctttcta

SEQ ID NO: 1331 - DNA, 550 bp, Ctenocephalides felis
  misc_feature (9)..(9): n = unknown
  misc_feature (14)..(14): n = unknown
  misc_feature (30)..(30): n = unknown
  misc_feature (47)..(47): n = unknown
  misc_feature (92)..(92): n = unknown
  misc_feature (96)..(97): n = unknown
  misc_feature (103)..(103): n = unknown
  misc_feature (127)..(127): n = unknown
  misc_feature (139)..(139): n = unknown
  misc_feature (143)..(143): n = unknown
  misc_feature (153)..(153): n = unknown
  misc_feature (201)..(201): n = unknown
  misc_feature (351)..(351): n = unknown
  misc_feature (422)..(422): n = unknown
  misc_feature (489)..(489): n = unknown
  misc_feature (508)..(508): n = unknown
  misc_feature (510)..(510): n = unknown
  misc_feature (537)..(537): n = unknown
  misc_feature (543)..(543): n = unknown
atgaagcgnagcgntatcactaataattgntatatcatcatctaagngataattaaaactaataaaattaagattttttcacttttaatgcnaccnncaacgncatagtttcaatggtggtgactgnatctggctttgntacnattgagtgcnaataattgatgacacatcgttttgataaataagaagatcaaagtatgncatacaatattttctctagtatccgggttggaaacaatttaatttatcaaaattataatcaactttttgaataaactatgatgacatgatgataagaaactaaaatgatattacataattgcatcaaatcatttttcaacccaatattgnttttatcctgaaattacttgatattgacatcatgctcaaattttatttcagcattttcatttgcatcatgnaatcgtacttttattacgtattcaaatttacccgtcatccgtagaccatagtctacgatagtgatgncagaagctgcttacactgncnatagtttctgaaaaagcgataaatctntaaatncgattaa

SEQ ID NO: 1332 - DNA, 550 bp, Ctenocephalides felis
  misc_feature (110)..(110): n = unknown
  misc_feature (234)..(234): n = unknown
  misc_feature (240)..(240): n = unknown
  misc_feature (459)..(459): n = unknown
  misc_feature (494)..(494): n = unknown
  misc_feature (497)..(497): n = unknown
cgcacgtataattttcataacataaccttaaaacaaagaacattttaataggacttaaaaaaggataaaggatactgaaaattagtgtttaataggtcgatagagactgngcggttcacaagtttttccaggacattaggtaaaggaatagttctcggtggattttggattataacaaagttaatttttatttttcgacatgtgtatcggttaattatcctttatcctgattgngattgnggttttgttgtagttatattcttaaaggcagtgtactgtgactgtgaccgcctgtgcctttgcatgtgtgtgtgtgttgtaagttgtaagagtgctttaattggtggaaccagttttgatcaagagtcaaaaggaatgactttgaaggtgcgtcattgaaaacaaaatgcctggtgcatttctacatatccctaatccttattagaacctaattaaaantaaattaaatctcagcatctagatcaaatatgagnacngggatttcttgtatacaggttcctcattattacatacattcctccatactcat

SEQ ID NO: 1333 - DNA, 550 bp, Ctenocephalides felis
  misc_feature (36)..(36): n = unknown
  misc_feature (81)..(81): n = unknown
  misc_feature (514)..(514): n = unknown
gtgttatcaaaaattttcaacatatgattagaaggngaaaagttggtgtgaatgatgttaaaatattcttatgataaatgnttttgaaaagaagcaatatggatttatcagatatagcgcggcgtctgaagaggaactttgatagctattcctcatatcgtcgtttcctcattgttttaatactgtttattctaatgcttttatatatggcaccttcagccttcagatggttgctatcgagttctaagcctctagaaaattatgaatatcgttgtatatcagacagattagcagcatacagtttcaaaagtgccgaatatgatgtgaatattagacataaacctctgcaaataaatgaaaaagattttataccatatgctggtaacggtttctttggtttggagatatctgacataggtcatataaatataaaattgggtagatcactaaatcttcctatattttatcacccattggttatgcatctgctgcaatggaaatagcttcgaagctncgttgttgaatataaaaaaggatcattcacaaatcc

SEQ ID NO: 1334 - DNA, 550 bp, Ctenocephalides felis
gtataatgcaataaataaatctaaacatataaatcactaaattatcgcgtgtcggtcctcaattgcattagtgaaaacaaattgtgaccatacagctataaaaaaagagcgcgcgaatcattaattaaagtttggctaaattttattttgttaaataaaagtatgctctttattttttatgtgtagttatctgtattatacaatgaggggagaatattaacatttctagtaaaaaaaagttaccggcataaatgtttgaaaatgagtgagcagatgagacaattatccaatagtaaaaatctttccctttctgtcaattataaatctcgtgacaaacccataatagaggaagctattgaaacaaatcaagtaaaatgtcagttgtcgaagagtttaatatggggatgcttgaatgcagccattctcgctataattggtttgatttaattgacgatgctttatccgtggcagtgaccacagatgaatgagtttagcagtttatactattgactatttcccctgtgctgtatattatattcaactggtagac

SEQ ID NO: 1335 - DNA, 466 bp, Ctenocephalides felis
gtaacttggaaaaagagctgtctcatgcaaagaaagataaagaggctatggtttcacaagtggaacatttgcataacgaatatgataatatggctgataaattagtgaagtatgaaagagaacatgtttttaaggccagtggagaaccagataaaaaagatgactagattaataatcccattcattttaattttagattttttggaattttttgattcatttattctcacatatgttttaattttgtttaattattattacaaagtacatattcaaacatatttaactgttaaaccatactaatattgcttgtttcctaaattatttacattaaatttaatatatactctatgctaattgtttgttaagaatttgtatttgtgcttaagcattgaatatttatgtagtttataaaactatttatataataaaatttaatccaaaaaaaaaaaaaaaaaaaaaaaaa

SEQ ID NO: 1336 - DNA, 550 bp, Ctenocephalides felis
  misc_feature (511)..(511n = unknown)
attattatgggggattacagcactcacaccaggctcacacatttacaaaaagatttgcgtctagctttgggtatggccgaggacctaaccttacccatgcctgtcacagcgactgctaatgaagtgttgaaacatgcaaaacgcttggggtttggggaagatgatgtatcagccttgtatttcagagcacgtttttaaatataaatttatatatggttttataatatataaaattttagactaatttatatatttccacaacagaagcatataatttagaaatttatttgtttataattattgactaagctaaaattttgtacttttggaaaattatttctattaggagaatgtagttaagttcacgtgttggataatttgtgttttaaatgttttacatgtaggtgcaatgacatgtattgaagaatagtaatttaaatttctgtcataattttacaataagtaaatgttagttattgatagatgctatgttgcatactatatggagtgnactcattttatttagttacaaaaatttaccgtatgaatt

SEQ ID NO: 1337 - DNA, 550 bp, Ctenocephalides felis
cgctaaggaccccaggaccggccctgcatgtgtgtatatatatagatatatatatatatatatatatatatatatataatagggtggatgttttcgaattttcttgctcacaggagctcaggtgcttccggattgataaaggacaattctctgaaagttttagctctcttaatgggaccggccgtggtcccgtggtaagaacgtgggctagcaaatcctagtcccgggttcgaatccaacctcggtcggttcggtatcaaaacagcttgataccaaattttcacttgaaatcatagatttcaaatatgatttcaagtgaaaatggcctttcgtgggcaaagctgtagtggcaacacgccacttggaagtaaagaggtactaagatggtatcgctttgaaatcaaaaaggaagtcgaatttgtatctctatacaacagaaaaatgtaaaggctctgacatcgtgcaccatgattgagtgcatttcaactcacccacggcctgccttggagaatattcgtaaagaaaatgtataacagtaaaatatgtaaga

SEQ ID NO: 1338 - DNA, 549 bp, Ctenocephalides felis
  misc_feature (473)..(473): n = unknown
  misc_feature (492)..(492): n = unknown
catcaagcaagttgaactcaataaataggaaataaattctttctttgtttttgattaaatagtgcttacgaggatataaggataatttcaagcagatattttgtgtgaaagttgtgcttttcaaattcaagaacattttagtaataaattaaactaataaaaaagttgctaatatctacttcggttttactgcaatttcttggatgctacaaaatgaattctaaaatattgtgtttcattatattttccaccttttttctggctaaaagtcaacaaataaattactacggcaactcaagactaataaatcctggcccatacaattaccagtatcctcctttaccaccaaggttgccgccaattaattgtgaaccagtatatgccacagttgatttctcatacttaagattcatgctggataaacttggttcaaagtagttcctaaggatatcgtgaatcctcaaaacttcggncaattgtgcaagcttccanaggcggtttgattcaggaagtgctaatgtagtgaagacgacagataggtttctggga

SEQ ID NO: 1339 - DNA, 413 bp, Ctenocephalides felis
caatgattgactgctatctgatactagtgaactaaaatatgttcaagtgcttattctataaactatcaatttattcaaagaaaaatcactttgaacataaattgcaacttattgtgcgaatcattggtgatatattgttttccaggcattaataactatttgattaaataaataattagaaatgttatgaattgtaatttgctctttactattattatttgtaaatttgtgatgcatttaaaaatttaaaaatattcatttgttgaataatatttgaaatgttttatgttggaccattgcaaagtgagcaaactcaaaaatgtattaattttttttttttgtatatgtactgccaatagaaacaattttttatttaaataaaggcaccttgaattaaaaaaaaaaaaaaaaaa

SEQ ID NO: 1340 - DNA, 549 bp, Ctenocephalides felis
attattttaagatgatatgatgctataatggtggaatccaaaattaatatttggaatgatattttgagagttttcattaattgtgtgatgtagaggtgaaaagtataaaaaaggcatgtattaatcaatgaagcatatttaattttaacaattcattttgccaaatatgacttttaattaaaatttatatgattaatattattttaaaaatcaatacaatttcaactgcttattcagatttacatgcaatatgtttcatttaattttatttaatatattaatagtccagttgaatcaatgggaaggcaaatactacatcatgtaattgttgaatactctcctatgtacttttagaatgatatggattgaacgaatgtatgaatgagagttaaaacaatcatattataaaaccaatttaaatcaaaacagtcatgaacctcatattatgcgaaaaactgccaaaaggtttttttaagttgttgagactggccttgtgacatttcaaaatgatatttgagtataattttatattatgagtcttccaaaatt

SEQ ID NO: 1341 - DNA, 549 bp, Ctenocephalides felis
  misc_feature (506)..(506): n = unknown
  misc_feature (539)..(539): n = unknown
  misc_feature (548)..(548): n = unknown
cgaaaccaactgaagacgtcacaaactggtcaataaaagcttattaatttctcgataaatgctattttatcaagcgtttccttgttaaatacaaaattatagtgattatggatcgatttcctaaatctcttgaaaatgcaattatcgaagcgaaaaggcgctttgaagaacaaagtgctttgacgtcagagttaggaccagcaatatttgacacccgtgatgctgctccatttgctctaccaagagcatatgtaacaggtccatgtttaagctctgacgaaagttcaaacaatagtagaacttctgaatcagcagttgttgctgtcagtcaccatacaccgaatgcattaacatcatttttaaatgatcgttattatatgggtcacaaaaaatcaaggaaatgttatagtattcaatcattttcaattcgatgactttgaaaatcgcgatggacacatgaagatgtagaagaattgaaaatcttttgggataaggtaggatcaagngaagttatgatgacttacaggtcgcaatactgnagtgtcatng

SEQ ID NO: 1342 - DNA, 549 bp, Ctenocephalides felis
  misc_feature (506)..(506): n = unknown
aattaatggtcctttcgtactaattaattttaaaaaattaaggatagaaaccaacctggcttaaaccggtttgaactcagatcatgtaagaattaatggtcgaacagaccaaattttaaaacttctgcattttaaaattatcttaatccaacatcgaggtcgcaatctattttgtcgatatgttctcttaaaaataattacgctgttatcccttaagtaacttaatcttttaatcataatttatggatcaattattcaattatttatgttttaataaaaaaaaagttttataaattttcctatcaccccaataaaatatattaatataaataaatttaataatattcttaaaattaatctatatttatatataaaactttaaagggtcttctcgcctttaataatatttacgctttttaacataaaaattaaattctatacaattttattaagacagtaatatttcattcaatcattcattccagctttcaattaaaaaactatgnttatgctcctttgacagcaaatactgcggcttttaatctcatg

SEQ ID NO: 1343 - DNA, 549 bp, Ctenocephalides felis
aataaacttaataacagacgtttattcaaagattaaaatgcgtataactaatttacaattaatgatgtgtttgatcaattaaattaaaattcttgggcctttgcagattattagcctatgaaaaataacttttgatagtgacgtatactgcacaaataactctaaatttcttgtaaatattcttgacaagatggaaatggaaacagatgctaaaaaggacaataaaaacatggctcatgttatgctaaatgaagtcactgatatgctagaagatgatttgcagccgatcgaacaatatgattacattgccttagatgaattgcaaccaatggaacaaggtcttgaacaatatcaagaaacaatggaaagtgaagaaaatcaaagtgaagaacagttgcaacagcaggaacctgaagttgaagaagtttagtgccagaaatagaggaaaaaccaattttgtcaaactgtcctctgtagaacaatagctccaacctgagtctcaaattaattggggggctcaggcagccaattgtttatcaaggcctattc

SEQ ID NO: 1344 - DNA, 549 bp, Ctenocephalides felis
  misc_feature (500)..(500): n = unknown
  misc_feature (507)..(507): n = unknown
atcacatagatcaataggaatttatccatatcttagagttttgaaggtatctgattatgctgacattgttctaagagaagctcgtagaattgccgaaggctctgaaacttacagtccaacagtaaatcaattatatagagatttaggcataagagtacaatccaggtatcatattgaagtcaaacaaacaaatggtgttctggaaaaagtaaatgaaatatatgatcaatattgtttacaaataagtgaaacttataaaaaactgcaagatattaattatttatctgaagagctggattcattagataagttaagtgattttaacacaaggcagaaatggcaactgctggttcatcaagaaaatcatggagcaagcacagatttagaagaagtaaattgccttattcagtgtgctagctgtggaaaattttgtacaatatattgatgcgtgatttaaaaatagatgtaaattctatgaagatgatagtaaacaaaagaantgcttcngattttacacttattagaaatcaaggaaattgtaaagaagag

SEQ ID NO: 1345 - DNA, 549 bp, Ctenocephalides felis; identical to SEQ ID NO: 488
  misc_feature (63)..(63): n = unknown
  misc_feature (112)..(112): n = unknown
  misc_feature (146)..(146): n = unknown

SEQ ID NO: 1346 - DNA, 549 bp, Ctenocephalides felis
gtggattagtatatcaacctctatcagaagaaatcagatgtccaccaacgccaatagtgacacgctatccaagctatttgagcagtccgttccatcatgaaaaaattacccccgaacaagtgtagctttaaaatatttaattctgtcgcaaaatttgcttggttagtctccatcgtaaattgatttgcaaataacaatataggaattttaacagcagcgctgtttgtacaaactgtagtcaaagagaacaaacctttaggatcagaattaatttatgttactttggcttatacattcctcgatcaatttacttaagtaaaatagtacactgtggatacttcaatgagatattgtcatatgtaacggcatgggtaataaataatttagttgtttatactgtctacttaaaataaaattggttaaatatgactttataattaaacatatttaaccacaggaaattagtataattagtaatgattttaacattacattgcttgaagaagttatgccagctcatgataatatcttattgtagtttatgataag

SEQ ID NO: 1347 - DNA, 549 bp, Ctenocephalides felis; identical to SEQ ID NO: 373
  misc_feature (480)..(480): n = unknown

SEQ ID NO: 1348 - DNA, 377 bp, Ctenocephalides felis
  misc_feature (362)..(362): n = unknown
  misc_feature (368)..(368): n = unknown
  misc_feature (375)..(375): n = unknown
attttatgtgccagtgctcctaataaatagttaatattagttcatattttagaatcaatttaagtttacttgtaaaatagatgcagtatataatataaataggggtgtgcattttaaagtttgcattgtaaaaccaaatacttctcatattctgatgcaaatacttcaataatttgttattgttgcaataagcaccccaaactgttgtaaatgaagttgcatgatgtgttaaaaatatcaacgaatattcaacaacataagtcaagaatgaaatgtaatttctgtatatataggtctgcatatgatttgtttgttacgatgtgaaatttcaataaattgttgacttcgttgaaaaaaaaaanaaaatnaaaaaantg

SEQ ID NO: 1349 - DNA, 349 bp, Ctenocephalides felis
cattcggttttcacaaataatacaaaaaccagattattaaaatgattggagtccgcgccatcacaaagtcgtccccagtggtcagaactcttttgcaacagaccaggaacttcaatgatgcttatccagtagtatcagggcccccaaggactaagatttctactgctgagaaaattgtccatggagccgtcatcacagtcggttgcttggccatccccgcttgggtgctcctccatttgcaagaatacaaaggagaacaataaacaatgaaaattcttagtaaatgtgtgataagtgtaaatttaactaaatacaaaggaataaagtaaaaaaaaaaaaaaaaaaaaaa

SEQ ID NO: 1350 - DNA, 549 bp, Ctenocephalides felis
  misc_feature (540)..(540): n = unknown
cttcaaacctttaatgttttgaaacacaaactgttcataatcaattgtagttttgtgataaaactcaatatgatcgtataaacctgtgtacctagaaaaaacagaggagcagggagggagtggacattttattctggatttccttgatggtgtacctataaaattttccttagtactgattggggaactgggaatgggaggcgtgtgaatttgaactttagtagaggaagtacaaggatgtggcgataaacttacgtgggaatgtttgtgaagacgatctgatatggaaggagcagaggtaaaagatgagcaagcagaaagtggatatcttagtttctcttttgttgatggtgtacctgtaaaattttccttagtactgattggggaactgggaatgggaggcgtgtgaatttgaactttagtagaggaagtcaaggatgtggcgataaacttacgtgggaatgttgtgaagacgatctgtatggaaggagcagagtaaaagatagcagcagaagtggatatctagttctctttgtgtgngtcctgtaa

SEQ ID NO: 1351 - DNA, 549 bp, Ctenocephalides felis
atatgaagaaaaatcctaataatccagtattaggatgcaaaacaagaacacatttatcgaagactgccaaagtatttggtgatgaacagtcagattctttaaattttaaatcattgctttctagctgtcctgaatttgcatctaaacccaaagctgcaaacaagcagtactcacaaaaagtatttaaacaagttagatgcaaatctaaaaccttagaaaatcaattagaagttcatcgtagtttaatgttaaaatcaaccgaagtgcatagttcttgctctcagcaagccagaatgaatgaaccatgtgatataacaattgatgaattagcatcatattttgagacttttgttcacatacccaaaaagatgtcttcgatggcagaaatgatgtatatttaatgatatttttttcatatttgtaaattgttacttataagttctctatatttatgtaaatgaattagtgtaatattgataaagtccattagttcatgttttgatacatataaatcaaatagatatacatcatctaagcttaataatagag

SEQ ID NO: 1352 - DNA, 363 bp, Ctenocephalides felis
  misc_feature (3)..(3): n = unknown
gcngttgtatcagtacctcatgatgaagtttgcgatttgatggtcggatttgttgaacttttaccaggatacgaggacaaggtcactgctgaagaactggaggaatataccaatgaacacgttcacgaccacgaaaaactccgaggaggcctttacatagtgcaggagctgcccgtactaacaaatggcaaaaaagataaaccaacagtccgaaaaatggcaaaagaaatgtctcaacagatctatgaaaaatacgacaactcgactagaaaataaaagacaaaacacctttgttaaaatagtttgtaatgtagatttatgataaataaaattgataaaaattaaaaaaaaaaaaaaaaaaaa

SEQ ID NO: 1353 - DNA, 549 bp, Ctenocephalides felis
  misc_feature (518)..(518): n = unknown
aaaatggctgactccgggggtgaaaaaggaattatagctgataataaagctggtgccgcccctaccggtgatgccttaagacacagtcgaccttcatccgttaataaaggccgtaggcgagtcaggcccatgtcgatggatgctacgccgatcaacgcgcacacgatgcactggttcgcctatctcggcccggaaccagtcgccgagcagcaggcccaattgtcggccgaacaacagggccagcctgacgctgcggcctctgccgatggccaattgtcggatggagagaacgaagatgttagacgttcaacgaacttcgatgccgaaaacaacgacccaggtggtgcttcggcggccgggtctcgcgaccgtcccgcgacggacgagcgactgcggcacgttcgcgacaggcagcaggaagaacgccagcgtcggctcgaggagctgaggcccaacgttggccggcagaggttagggaacagaagaggaagagaggaggaaacggatcgaggagatcngctgaggatatgacagcgctctagtcgaaga

SEQ ID NO: 1354 - DNA, 384 bp, Ctenocephalides felis
attttgataacgattacagatatctacactttgtcggaaggttcgcattcaatagttttaaaaattaaacgatatgcttaattagttcagaacctaaaaaatatcataaacaactttaatataaattaatgtaatcacatcattatgctttatagtaaatattttaaatgttataaattatatattttgaaaacatagttattctatgcaaattacgcaaatatgaacaaatttttatcaacataatattatttatgatataatagtaatgtccgaatttaaaatatacgttctcgtatgaaaatattatacaaatcaaacaatgcctattcgaagcgaaatatctaattaagaaatttatttaaattataaaactgccaaaaa

SEQ ID NO: 1355 - DNA, 288 bp, Ctenocephalides felis
gttaagcatgacccagaggaattgaggaatttggctggaaagccagatataaaggttactaatgcataataagaacttaaattagtaatgcagatatcaaattcattatattgttataggatacatttgaagaactgaagaagagactacattcttggcagcaacaaacaaatgatccctggcgttgtgctccacattctgtgcttatggacactcctggtataactgcagaatgtttgccactatataattgaaattggaacaaagcttaaaaaaaaaaaaaaaaaa

SEQ ID NO: 1356 - DNA, 549 bp, Ctenocephalides felis
  misc_feature (441)..(441): n = unknown
  misc_feature (531)..(531): n = unknown
  misc_feature (541)..(541): n = unknown
acaagtctgagcaggtgcgtcatttatgttaggtaatataaaatttattatgatatgttaattttaaattttataaatcctattcttttttaaatttatcaatgtataataatacatttttgtaattgctactgaaaatgattaatttccacttcaatttcaatttttacgtgattcggtagaggaatagttacagtataaatataatcaatggatttcaagatatgaatttagaaaaaaaatgtttaaaccagcccctagctctcctaccataaatttatttctaatatataaagatgtatcagattaacaactcagtctttccataattcttccaagatattataacagcatgttgccatgtctgatttttttttcattaaaatatttaaaaaattagttatctacgcgtgctccatgcgtcttacacgtccttcttgnagaaacagattatcattatatatatttatatcataataataatcgaatttatagatttatcgtttttcagaaacttgtgcaggtgataancagactctgnctccctat

SEQ ID NO: 1357 - DNA, 549 bp, Ctenocephalides felis
  misc_feature (31)..(31): n = unknown
  misc_feature (509)..(509): n = unknown
  misc_feature (519)..(519): n = unknown
ctctcgcagtatggtccttggggctttttgntaataggcgttttaatttgcggggtcatgctactgatttgcggactttgggagtgttactgccgccgacctcaacagcctagtccgcctctggtagatccttgtgcctcaatctctcctgataatcatgtggtagcaagtaatttagaaaatattagtccgcctctctatgatgaattggacactccaccagcttataatatcttatttccgccggaacaaaaaagtatacctgtagcaacaaccagtgaccagggaacgagttctggtaatattccagtgtaaatgaagattactattagtttttattttgttttaatgtgtatcacaaaaaaacgagtttatggatcttaagtcttattaattgctgaactaaatgaatgagatgccctcctggtgcatctcagtgaatgtgaagatgatgaacttaaataatgacgcttgcttaggttcaggactgcttaactgtgattcttctntcttattcangaagttaaactatcttgaaacaacaagtaa

SEQ ID NO: 1358 - DNA, 497 bp, Ctenocephalides felis
  misc_feature (4)..(4): n = unknown
gctnatgtcatttatacgctacatttatacgcgctaaaaatttacaaacaaattttctgggtcgttaatgggacatttaacagatagccagtaactgtcaaatagtttatttattaaattgacattttttaattattgtatttttaaacatgttataaagcacataacctatatgttatagtattttttatcgcgttacatttacaattatgtatactacaaaaatagagaaaaacatgtgctctatttgtgagaagcaatatgatcgtgattgggaaattgaggaaatgcaaacaaatattgctcttgaacctacagaagaggaattctcgagacgtacaagttcccggtcaaacaaccaaataagtactattccacaaaacgaaagcaatatgatgattttagaaatgttagccaaaatgagtcatgaaataaagcaaatatctcaagaacaaaaagaactttccaaacttctgaaaaaagaaaagacaaaaaaa

SEQ ID NO: 1359 - DNA, 549 bp, Ctenocephalides felis
  misc_feature (518)..(518): n = unknown
  misc_feature (521)..(521): n = unknown
gaactttattaaaattcaatagttacaatttaagtcatttacaatacataattattctaaaaattcatttataaaataatagggattatttagtaaataatttttaacaatatttttaaaggtgaatcttgttttgcatctccatccatcaggtagcttattatagatcttggcacccaatgtagttcttagcgatgatttgagtttgatttttggacatatcgctgcatttttattccgcgtattgtggtcgtggacatcacttctcaataaatgattagttttatccgcatgcaccgcaatagcttgttgccaaatataaatgtttgtgacagtcaaaattttgtgttttatgaatagcggcctgcaagactcccgaggtaagactccttctattgctctaaccgcttcttttgtagatccataactttagaagtggtgcactatatccccaagctaatattccgcggacgagtcactattaaagaacgtgactccaacgcaaaggcgaaaaccgnttnaggcatggcccctccggaccatccccta

SEQ ID NO: 1360 - DNA, 549 bp, Ctenocephalides felis
  misc_feature (31)..(31): n = unknown
  misc_feature (516)..(516): n = unknown
  misc_feature (532)..(532): n = unknown
cataaaaataatatatatttcaaagccctgngttatgtaatgcttataaaattcttaacaattatatgtatatatgtacatctctttctaactcaaacgactactaatactgctctctcgctctgttaccatagttgtacggctgtgcagtcacaggtctcaaatgagcccttggaagaccttgagcatcgtaatcaggctgcggaataactggcatacggcttccataccgcgtagcaggattatcgtaatccgtcgtttgagtcggcgtaggttttcttgcaaatctggtgtttcctacgactgcaggttttggcaacactggtggtggagttccgtatcctggtgaatttggattgctaactgggtaattcaagttggagccacggtcgtctggtgacttcggggcgagaatggagggtttaagggagatggtttgattgctcatttggtcgatcggaccagcgtagcattgtgttgtaaccttgtggacttgatatatatgcgtcaaatgtntccgataatctgtganggtagactctgtttctt

SEQ ID NO: 1361 - DNA, 549 bp, Ctenocephalides felis
  misc_feature (464)..(464): n = unknown
  misc_feature (514)..(514): n = unknown
ctgtgattatttactatgtttgtcgtcgaattataaattcataaaattatttagttttatagtgaaattgaaatattctaaaaatgttgagtaattctgatttcttaagaagaccggatagatctcacataagatcatcaagaagatatgactgtgacgaacgcgcctctaaacgacgaaaggattcattttatgaatcttttatatctcatagaactatactagtagttgaaaacaaagaagagcctacatgcaaagtttcaagatgccgatggtctggatttgatgatgaattattatcgcattgtatacacaaacacaacgttttcgaatcaaatgaacaaaatatagtcgagtttcagaattggcaaccaagtgatatctacaaaggagttctacttaaatttcgcagtttgctgttgtggttattcatggaaaatgacggtctaatattaatgtagtgncagaacgcagctgcgatgtcacgagctgtggattaggtcaatgtagctangtcaaaagatgtcaagaatgccagaatctgtaaat

SEQ ID NO: 1362 - DNA, 549 bp, Ctenocephalides felis
  misc_feature (513)..(513): n = unknown
atttaaaacattccatataaatgtagttttttagctattgtttttctgtgataaattcccaaaaaaggacatgacattatagtttgaacaagctgattttatttataaaatataatttattgtatatggatgtgtgattgtgttaggtattgcatgggtaaattttgtttttaaatatcttcaaaacagtttgtggtaaaatatttaatttaggaaatattgttatatcatgaatatgccaactgaagtaaatcaaatataaaggcactttgtttagatatttaaatatttaaaatgtttgttaaatatatatatttgttatttaaatggcctgcaatattactgatattgcctgttcaaatctctaaattctagtaatatatgtcaccattcatgtgcatttattcaacgattgttttatgaagctctttacagcttcgcttatagttaaaatatttagcctaacattattaatgatattatcacattagaaatctgtgaaaatattgctgntaaaatgtatgtgagtttaaattgcaatatccactc

SEQ ID NO: 1363 - DNA, 549 bp, Ctenocephalides felis
  misc_feature (511)..(511): n = unknown
ctttgacacatctaaaaattattttaatttacaaaaaagaacttcataaatttaaaagagagttaaataaaaatttaaaaaaataacactatttaaaatgcaatatttaaacatattgaataaaataaacaatgttgttagagttaaatatttatacgccacataggttttaaataaataaataattattttaaaaaataatttatataaattactttgaacaaaatctagcaataagtaaaaatgggttccgctattaaacaatactatgcagcttttgtagccaacatcgccacaatctgctacggcaccacaataggctggtcaagtccagccctgtcagccctttcaacatcgaacccttcaccaggcaaagacatcatcttccaattaaccgacgaagaggcctcctggataggcggtttgatttgcataggagccctttttggaggcctttgtccgcctggttggcaggagtcaggggcagaaagttgtggatatatgacgtcgnccatcataatcagtggctttgctctgttgcgaattgtc

SEQ ID NO: 1364 - DNA, 549 bp, Ctenocephalides felis
ccattcgccgtattttcttaacaaaacaatatttatacaaaatttatgttcaataacactgtgtaaacccataacttattcataactatgacagcaagtagaaaaagcaagagttgtgctaattatacgatgaagaaagtagcagccgatcatggaaagttcctaaataggatcaccaaaacgctttattatggaaaactaccgaatactgatcgttttagtatacccatgtcagaattggcagtggagatgttctccgaagcccatcgtggccacactctgcaaagactacaaatgaactcggcttgcaacatatctcgaaatgcctgtgtcaacccctgcgctctcgtattggctatgttatatttggacagactacgtgattgcaaccctgaatatgtgcgacaagtagcccccagtgaactatttcttgatctttgatggtctctagaagtttttgcatgacgatggagctgaagatgaagtatttttacacgaatggctgctcagggggtattcagtacagcttaaacactagaaaaagattct

SEQ ID NO: 1365 - DNA, 549 bp, Ctenocephalides felis
ataaattcatataattaaatttgtaaattttgaagacatttataaaaccaaagtatttatttcaatttaatacttgaacattaattttaaaattgattaaattataaagtaaattaagataagataataagtatagagtttcgtgattaaatataatagtttttatatttttatataataattttatcgagataaaaattgataaaggttttttctttggatcttaaatactatgaatacctaatacaagttatgtattatatatttaccattgaggtaaattttaagcagttttgtcatttataatatgttgaagttgatttaacaaaaaattaatcgtccttatgtaaaacaatatataaaatatttctctagaaccaacctcaatgatttttacaggtatataacaaaataaatataaatacaaaatttatattaagttgtaacatcaacatatacttatattaatatctgaaaaattatatattcataattattaccctatctacatattatatcctgtctataacttcattcaatccatattgg

SEQ ID NO: 1366 - DNA, 549 bp, Ctenocephalides felis
  misc_feature (468)..(468): n = unknown
  misc_feature (479)..(479): n = unknown
  misc_feature (549)..(549): n = unknown
attttatgcgacattttgggttatatgatttttaaacatctgaactgtaagtcttttttcatatagatttattaaaaagaatattttaaaaattgaattcttcctaaactattgctaaggaataaaaaaaacatcgtcatacatttatatacttagctaattactgtaaaattgtaagaattcattttataccttaatgattaaccatattccaattaaaacacttagaagacattaaaaaaatcaaaagcactaaaaactgttatggaaaatcgaaatatatgtctttgctcttcagagcaccggttaaacaacaatcaattcatttttttttaaagattattcatatattttgggtgtcaatgatcttattagtttaaatatttttgcatctgtagaattaactgcagtagtattttgcaatgcattttcaaagtttataatgcgttttgaattggaaatgattgncattaaggtgnaggtgaatcttcatgtataatattaaataagtatctaaatgtttttttggttattatcaatagttttggn

SEQ ID NO: 1367 - DNA, 371 bp, Ctenocephalides felis
gttatgaatcaatggcatcacctcaaagtgaaacttctattacaagcagtgaaaattattgggatgatagactttatgaattgtttccagatttggaattctaacagtttaaatatttacttaatatgaaatcattcctatttttatattgatatttttattatgaataagttcataatggaagtaccaattgtttaagaatgctatgccatcattcgcctaatattagtaatatatgaaatcaaatttaattatgacaaataatatataatgtttagcatgtcatatttatttaaagtattttgtatattattattacaaattaaaaatagcttatcaaataaaatatatataaaaaaaaaaaaaaaaaa

SEQ ID NO: 1368 - DNA, 549 bp, Ctenocephalides felis
gtcactggttactggtcactggtcattaacggcgacacgcacgctcgttaatttacaattgtcctgaatttgatttttttatttggcggttccatgagtgattaattctattaaattagtttgtgtatacataatatgtgtttgtaatgtacattggattctgattttaacacgtgcttgaaccagtatcatccgagatgttgacaataaccagtacttagaattatcagtgccattaaagattcgtttgtgcagaaatagacggaaaaagtaattttaatattgttagtgatttttttgtaacttatttgacaatgacgagcacaattggagtgggttgtgacattcaagttgtggaacctaaatcttgttccttaccggtaccacaagaacctttaagggagcctttaccatcagacaatggttcgttttatagtcggcaaggtcccaaagtgaggcgctcacggattgccgaagaccctgtggatatacagtcaaagacatcaagatgccgctcgctgggttcaggaaagggataaagaaatttac

SEQ ID NO: 1369 - DNA, 549 bp, Ctenocephalides felis
  misc_feature (510)..(510): n = unknown
aacgcgctaacaagcgatcacgaacccaatcactaatagtacgatcagtaagtgaatcacttcactagtgatataaatggtcaccgattaaacgatttaccggtaaagtgttcgtgtgagttattaaagtgtcggataacaaaatcacaggacgaagcaagatgaatttgtgcgtgccactcttaaatttattgatcctggcgctggttttgatagcgcaatgtcatgcttcgaaaattccggagggaatgcctttaattcttccaaaagatgccacaccttcacccttattgagagatccacccacaccacccctgcttctcccaagggatgcgactactccaccaccgccaccactggtctttccagaagatgtcaaaaactacaacatcgtaccaaataatgcaacgatcttggcaactttgacgcataaagacgataccaatcaggaaagcgctgaggataataatcaagaaagcgatgatttaaataagacgcccggtcagaggncctgcaaggaagtgtatagcacagaagtacagagaggtt

SEQ ID NO: 1370 - DNA, 549 bp, Ctenocephalides felis
gaagaaccagggatattacaccattcataataaattatattgcgatattcacgccaagctcgttgctcgccaaaatccaccagctggtaccgaaggatgcattccattcaccgtgccacccggcggaaaaattccggtgagcgctatctccgcagctctggctgcccactcgtctcatccacttaatggaggtatggcaccacctaaggaccaagcaccctctaccccgggatatgcaccagtttcagcaccaacatgcaccaatctgtgtgttcaagtgtctccttcggccgtcaatgatactaaccagcctaaccaggttacatacgaatccaaccttctagtacagattgctcccaacgatcccacatatactaatgacgaaactttagagaaacaacggaaattgaattcaccaaaaagttcacttgtgaactatgtgaaaattactccgtataataacaaccatgaaactagaaattcacctacctcgattgagcacacacatctctaaatcagaaactaatcatcccgaatggactgtattaa

SEQ ID NO: 1371 - DNA, 550 bp, Ctenocephalides felis
caaacttattgttaacataaaccttaccacttttacgacctgttcaacacctccaatctgaaagtaatgtcgatttaactcgggtcgtataacacgttgggtatgacggtggcagagacagaaattgtgcaatcagaaagataattcggaagaaaaaatatatttatatatagatttgaaactgtcctgactacgaaatgtaacaaatattatgatttacaagtatagaaacatggagtgcctagcttcaccaagaaatctaagattcaaaataactttatggacaaccctatatgtagcagaagtgattatgtgcaaggagaagaaaactgtgactaaaaatattgtaaacatttagtattaacaattgatatttctattgcaactttattggtaaaaaaccaaaattttcactactattaatttacattaatagctactaaataattcaatcactctaaagaatgactgttttcgatcctactccattcatctataaactggtctatatgcaaagtatgagacaaagaagtttactgtccggtgtcgg

SEQ ID NO: 1372 - DNA, 550 bp, Ctenocephalides felis
  misc_feature (550)..(550): n = unknown
attttgttttacattaaatttttcaaattcgatatgaaatttttactggcaatttgcgtgttgtgtgttttattaaatcaagtatctatgtcaaaaatggtcactgaaaagtgtaaatcgggaggaaataatccaagtacaaaagaggtgtcaataccatctgggaagcttactattgaagatttttgtattggaaatcatcaaagttgcaaaatattttgcaaaagtcaatgtggatttggaggtggtgcttgtggaaacggtggttcaacacgaccaaatcaaaaacactgttattgcgaataaccatattccggatgaaagaccaaattgatataaattactaaaattatgctagatagcaatcataaaattttgaagttttcaatgatcctaacatgttttgcctcaatttattttaacagcaaattgtggaactaccgtccgtacaaatgtcaagaaatctgatgttacaatagatattataatatgtacattgctatattatagaatatatactgattgcaagttgaaaaaaaaaaaaaactgn

SEQ ID NO: 1373 - DNA, 550 bp, Ctenocephalides felis
  misc_feature (440)..(440): n = unknown
  misc_feature (473)..(473): n = unknown
  misc_feature (495)..(495): n = unknown
  misc_feature (498)..(498): n = unknown
  misc_feature (500)..(500): n = unknown
  misc_feature (503)..(503): n = unknown
  misc_feature (511)..(511): n = unknown
  misc_feature (516)..(516): n = unknown
  misc_feature (524)..(524): n = unknown
  misc_feature (531)..(531): n = unknown
  misc_feature (537)..(537): n = unknown
gcaaataattctgtgttgatatatcttgtcatattaaaaacaagtgaacttgtgaaaatttgcaattaatttgggtgacaataatgagacttattatatttatatcgtgcttggcatcaagtacggtttaaatgtacctatagtcaaaggcataataaaaacgctagtggaatttgcaccaagtgttattgtataaaactgcaatatgatcaatataaaaagtatatgtccttatttttttgtttatattttactttcatcttatataaacactattttatgtatcccggtaccaatgaggcgctgtgcaaagttatacaactcaataagtcctcaagcctcggcagagtacgatgagaatggcgatatatcaaaagatctggtcgaaaatctcttacacaggtgtagaacaatgcacaagtaattttgtactcttgtgncggaaaatgaaacggtctctcatgtatgggcanggtgtggggaactcaaataaanaantngtntcccaaanaatgnttacatgnccttttntaagcntttatccaagatt

SEQ ID NO: 1374 - DNA, 550 bp, Ctenocephalides felis
  misc_feature (4)..(4): n = unknown
  misc_feature (34)..(34): n = unknown
  misc_feature (137)..(137): n = unknown
  misc_feature (150)..(150): n = unknown
  misc_feature (154)..(154): n = unknown
  misc_feature (180)..(180): n = unknown
  misc_feature (183)..(183): n = unknown
  misc_feature (210)..(211): n = unknown
  misc_feature (224)..(224): n = unknown
  misc_feature (265)..(265): n = unknown
  misc_feature (319)..(319): n = unknown
  misc_feature (350)..(350): n = unknown
  misc_feature (485)..(485): n = unknown
  misc_feature (516)..(516): n = unknown
  misc_feature (522)..(522): n = unknown
taancaaattcgttagttttgaaacaaaacattnttttaagctttaaacggattttttatcacctgaggaaatcgatttatacaatttttggaactatgcgctggtgttctcacttttctgattttttaaacagttntgtgtgagatatnaggntcgtaggcctttgacatatatgccgnacnagatcctcccaattttattattggagnnggtcctaatttanttaccccattccaaaaattttaaatttttgccaaaaatgcntttctaccatggttaaagctcaaatatccggacttttttattgccttattattngatgaataatttcgattatttgatttcgatncaaaatctaaatgaaccagtttaaatccaaatcaaataattgaaattatttgtaacaaaaaaaaaatttataatcccaaaaatataaaaaatatttatttctactcattgaacacaaaattcacatagaaaatgngcctgtttgctatacaatatagattaaaatntacgtncgtattttaataatttttgcatatttat

SEQ ID NO: 1375 - DNA, 348 bp, Ctenocephalides felis
caatagaaattaatgaaggaatgaaaatttattagttatgtttgacctcatctagtccgttgactttggtttaaaaatataacgtaattgagttaccagtatgttatatgaagaaaccagttttttctcaggttagtaagttatattcttgtttgttttgttaatcaatcaaacaactttgttttactgatagttctctaaaactgattaataataagcctccccagtgagttgatgtcttcatagtaataaagtgctcttaatactccaagttttatttacaaaactagttttttttgtaaattgtgcaaataataaatgttactgttcaaaaaaaaaaaaaaaaaa

SEQ ID NO: 1376 - DNA, 155 bp, Ctenocephalides felis
gcattgtttaaatatttttcgattgtataaaattgaattataatgccatgtgtaaaaatataaaagttatgtatttttaacattatatttatagatatataattgtaaataaaaataaattctgacactaataaaaaaaaaaaaaaaaaaaaaaa

SEQ ID NO: 1377 - DNA, 550 bp, Ctenocephalides felis
  misc_feature (4)..(5): n = unknown
ctcnntttcagttgaattcttctattcgtcatattgttttacatacaaataaatgcaatgtgcgttttgtaacgggatctgtgatacttcatacacacatatgtatgaatgatagaaaataacatttccaacgttcaagtagatactgtatgtagtttagtgtttgtgacggaattcctgcagatcggaaattactaataattacctgtacagttggacattttcaatcaaaaaatgtactggttagctgcattattgcttttgtctacgtgctcagtgtttgcccaatttaatcgcaacatttcccaatgctgcgaagaaagttgctacagtactgatgaccaatcccaaaatacaagatttgcgactaaaactgcttatgaattagttaaaggagtcagaggagatctgacagggttccacattgtgaacctgtacagttctggttgctgccagacatggtctagctgcaactgccaagaaatagcaggatgccacatttggaagtttggagatgagatatcgaaattatcaagacagaaatctggct

SEQ ID NO: 1378 - DNA, 550 bp, Ctenocephalides felis
  misc_feature (500)..(500): n = unknown
gctgctggttaaatattgtcaaggcactttaatttattgttatattacatttgtttttatttgataagttaatatttgattttattattatttaaatgtgtggcaaaatgattagaataatttattcaaacctgttcgaaaattctgccgaagtaagatgcctacgtattcgtcatcattccgtcatctttgctctcatttgctgtgcaaacaaatattgtgaaagcagaaatgaaatgaagtaaggtgttctggcgcggttgttgtttatgttagttttgaacaaatattaagcgaagtgaaatatcactgttgatgaatatcagtcatgttttgatatatagttaattaataatgatttactttgatatcaagatattgatatttaattaatgacacttttattttgcgtgcacgttctatgtttcaaagtttatacacattttgatttgcttgattattgataaatcatgacgaaaagaatcggcggcacttacgtngacgggcatactagcaagggcaggaaatcatggaaactgttaggtccttc

SEQ ID NO: 1379 - DNA, 550 bp, Ctenocephalides felis
  misc_feature (3)..(4): n = unknown
  misc_feature (23)..(23): n = unknown
ganntttctaaacaagatgcctncaaacctgatggagctgaagcgaaaccggatctagaggagaaatactgtgaaataaaacttgcacaaccagaaattccaacttcatctcagaccagcgaactaggtccagcagtgcttgtggaaaagactccagaaatcgggccagccgtgttggtcaagaagggtaaggctgaaacagagaaaactctcgagttgggtcctggtacaatctcgacggttgccatttgtcctaatttaacagtcgctgaaatttacaatgcccctttattagcagcgagcgaaccagcaaaaccaaatgttcaagctgatgtcgctccagtcgattccaacaagccatcgactcaaccgacagaacttgtagccgcggaagctaaacctgcagcgagcgaaccagcaaaaccaagtgttcaagctgatgtcgctccagccgattccaacaagccatcgactcaaccaacagaagttgtacggcggaagccaaacctgtgcacacctaagaggttctaaacaccagtgtatcgaggca

SEQ ID NO: 1380 - DNA, 550 bp, Ctenocephalides felis
  misc_feature (425)..(425): n = unknown
  misc_feature (429)..(429): n = unknown
  misc_feature (468)..(469): n = unknown
  misc_feature (493)..(493): n = unknown
  misc_feature (519)..(519): n = unknown
  misc_feature (528)..(528): n = unknown
gaatttttggttattctaaataaatatatttaaatacgaaatgctgagcaaatagtaatataataacaatttattttatgttttattaataaattacacaatggaacaactaaataacgctttaaaagccataaaagtgctccgttcgagtgtcggacatgtttttgagactttgtcagaaggtttaagaactgaacatggacaagatactaaagacacaaagtttttgattgaattacaagaattgctgagtgctgttaatgttaacttgagagaggtagagacttcagtgaatagtttaaatgcgccccccgggccattcaatttagcaaacactacttatttaagtcaagagactacacaggagagacaggctttgtctcgcagcttgtaatagtatagtggccgataagattcatgagtcnaggncctacacagctttttaagtcaaatgctttgaaaggcatnnttaatcaagcatgcgaaaggcggnggacccaactttctttacatgtgccnccgaaacgnggttctttatacaagttttcag

SEQ ID NO: 1381 - DNA, 550 bp, Ctenocephalides felis
  misc_feature (451)..(451): n = unknown
  misc_feature (518)..(518): n = unknown
aatctgtggatagttcatttcatcgtcctccagtaaaatcagcaaaggctgaatagtgctgaagttgctgcttgtaatactgattttgccattcaattggaataggcatattattaagcaaatgaaaaaagttacaaataattctaattgaactcgaaatattgtgtctaccatatggaaatcaattgcatattgtagttattcagcagttcaatgcatttttgaaatgacatttcgtgaaaatttagtattagtagtatttcccagtgagtgtctataaaactaaatagttcgaatatttaaataggacttcctaaagccatttttaatagcttttattccgcatagtatttattaacttatacctccagatgcaaatattggtccttatggtaatcctcttatccttattattcctatgtaaatatgtaaaaattggttataaggaagnatgtttattatccaagtttagatattatcatacctattatattagactgtttgtggcatgctttganaaataataatatggattatctattaatctgtc

SEQ ID NO: 1382 - DNA, 550 bp, Ctenocephalides felis
catctgggaaattaggcctggagcaaggattatctcctaatgtttgtccaaattcaacataaaaatatatattttaaaatataccatgattatttagtagctggagagtttgaggtaaattttaatgatcagttcattgtttgaaattagttttgaacacagacaaaaaaacaagcagtttgttgatatatttgaattcaaaacaaacttgcaattctcgattgcacattaaattctgtttttttttctgatcacggatgaagagatttaaaaatttgggttttgggagtgttacaaaattcgctctgagaatataccgcgcgaattctaagttgtttactctaatttatataaattatattagaatgctaagaatgaaagcagtcaatccctaaatataaaatgagaaatagtttagttttaaaggcagcgtactcaatataattataataaacaaaacaaatttatctcaatacaacccgtaacgaaacttttatgtggatttggataattctttgggatatcggaaattaaaattcgatagatattt

SEQ ID NO: 1383 - DNA, 550 bp, Ctenocephalides felis
  misc_feature (550)..(550): n = unknown
ggactaggagcatgaatatgtatgaataatccaaatatattgggttttattatttttttattgatattaattttgactatttatatttgccataaagtgaacttatcaaaattagtgtcacgagaaaataatttagaaatcatggggtccattaaacaacctggcaggtttatgaatacacaacaaaatgcacagaggacaacaaaagctcaaggtggttttccacaaagcttatctggaagtgagactgatgtgtccacatccaatgagaatttatcacatgaagagcgatatgttatccgtcacactgcacgtgttgaaccacaaggtcaagagaccttgcaaaacccatcgccaagtcccactcaaagcccagtgattaatcgattgaaatcaccaaatcaaaatgtacaaagaaaattggaatccaacatccgagaccattgatatgagtagaaaaatggaagtattaccagtccaataaacatgattcaaattatcgaaataaagagctccatgccagaatcattgcatatcagaatcgagaatn

SEQ ID NO: 1384 - DNA, 550 bp, Ctenocephalides felis
  misc_feature (545)..(545): n = unknown
aaaactggaacacaagcaattatttcttaagattaaattgattgggttcacatgcaacattttaaatactcgaaacatcgatatatctattgttgcaaattaaatactgcgaacgatgttgttctcttttcattattttggttattgtcataacaacataagaataaaccttttacttaattgaacaggaatggaaagtatgaaaccgtggttttaataaaagtaagattataatttaatgattagaaccacttttgattaaatatcagtaaatgtaaaagcctcgtataaaacgatgatatgataacagataaggccaatatagtgattaaagtcaatctttagacagtgaaaagtttaattaattgtttattctaaaattaaaattattattcaatactatttaaataaatagatactcataatacaaatattaaacataaaataattcttgtaatcatgagtataatgaatacttaatataaatgggttattaataactaatatcattatataattatatataattggattcgagtgaaacncatac

SEQ ID NO: 1385 - DNA, 550 bp, Ctenocephalides felis
  misc_feature (5)..(5): n = unknown
ctttngttagttagttgtgcaagaaaaattagcatttggtcatttccaaagttacatatggtttgtgcaaacttgatgcaagttgtcgacgcgtgtagaaatggaaaaatggagcccccttagcagtcccgagcagctaatcgagtgacatttaaaagggcgcaaacgttacatcggagcatgaatagcaaggtggaccctttgccagacgagcacctgattattctgaataaattatccgctactgaatcaacattcctcatcgcttttaatccatcaaacaattcaattatccacttctgaatcaacagccctcatcgcctttaatgcatcaaacaattcaattatccacttatgaatcaccagccctcatcacctttaatgaatcaaacaattcaattatccacttctgaatcaacagcctcatcgctttaatgcatcaaacagtaagacttatcaactatctatcaggcaattcaattatccacttatgaatcacagcctcatcaccttatgatcaacaatcaatatcactataatcacagcccta

SEQ ID NO: 1386 - DNA, 550 bp, Ctenocephalides felis
  misc_feature (5)..(5): n = unknown
  misc_feature (430)..(430): n = unknown
  misc_feature (484)..(484): n = unknown
  misc_feature (509)..(509): n = unknown
cttcntggtacgggttggtcgttggagttcctttggccatagtgtttgcgattgtgattggcatattaggttatatattctacaaaagaagaagaaacgggtgcgactacagggccgcagctacacattgatatagaatcaaaaaaaaatattcagaagaaaaatataatttcatacagtatagtaaatgtataagtagttaattgtagtaatatgtttgtttatggaacttgcatttatagattttttaaattgaaaatcgtttaaaatcaataataaggctaatgtacttgcttaccaaaataaaaatatcagtaagtattataaaatttgatttaacaatttggacaaattgcttaaaaataaaagtcttcgaatatttttggctcttattttcatttatttcattttattttttggtactaataangctggtatctctaagtttatttcttatccagagattttaaattaaatttttaanccaaaattatgaatggttttaatcnctaaaataaaaaccaaaatttatggtagaataaattttttt

SEQ ID NO: 1387 - DNA, 550 bp, Ctenocephalides felis
  misc_feature (2)..(2): n = unknown
  misc_feature (5)..(7): n = unknown
  misc_feature (10)..(10): n = unknown
  misc_feature (18)..(18): n = unknown
  misc_feature (27)..(27): n = unknown
  misc_feature (37)..(38): n = unknown
  misc_feature (59)..(59): n = unknown
  misc_feature (156)..(157): n = unknown
  misc_feature (172)..(172): n = unknown
  misc_feature (177)..(177): n = unknown
  misc_feature (203)..(203): n = unknown
  misc_feature (346)..(346): n = unknown
  misc_feature (467)..(467): n = unknown
  misc_feature (532)..(533): n = unknown
tnatnnngtncgagattntgtattaantatatcgatnnttttccagtcgccaaaatggngttgttgagtaaatttaaacctattgatactacttgtattgaatatgtgcacccttggacaaatagttgttctgatgcctgtgctgatttaacactnnaggctttcgagaggnccatnaaaatatatacagttgcatatacagncggactattgatgcgaggcaaagtaccaaataaatcggacttaagaaagacttttctggggattctacaatctgcagcatttttaacgacaaatggttttacattccctatgtttttatgttttctcagaaaagtttgtggcnattacaatatattgacagtctcatacgtgccttcgtttcttgcatcgtttgctgcaatattactagaacggcatctagacgaaatttattatgtttatatgtatcaaatgaagcaacaganactgttggaatatgttgaagtctaggggatatgtccgtctataaaatatggagaagtgggaatcnnttcatgagcatcgtatt

SEQ ID NO: 1388 - DNA, 542 bp, Ctenocephalides felis
  misc_feature (3)..(3): n = unknown
  misc_feature (7)..(7): n = unknown
  misc_feature (32)..(33): n = unknown
ganttgnattcatgtttactttcccatctganncagaatatcagattgttgttttaaagttaaatttttaacgtattctattaaaagatgcaaagaaatatttccttaactatattgaaaacaaaacacaattatatttgtatgtgaattatctctgcttagttaataattaaatttaggtatagacaccactaggtataaaaaaagctcaagatttttgtttctagtacattttacttcaatttctcatatttgctccatttccataaatcgtatgtcttcaacgtaaaatttcatcagatgcgaaacattttcaacaagaacaaaagttactattcagtttctcggtcttaatttaataagccattttctatgcactgacttccaattttccatgtttttatattataatttgtatctatttttttgaacaagtttcgttcaaactaaatcagctcgtagtttttcgcaataatgcccaataatttaaactttcgaggttgtgcttatgggtttgacactagacaattctttttgagtcc

SEQ ID NO: 1389 - DNA, 542 bp, Ctenocephalides felis
  misc_feature (542)..(542): n = unknown
gccgtatgcacgtcaggtcggtaggcaggaataaaaacataaacactggcaaattgaaacgtacatttgctacatttgtcattatgtaatcgagccagtgcgatcgcacggccgtacgggtctgcagcattcacgatcagtcattgatgaggtgtcgtattgtgttttgctgtaatattagttatatatgcgaagcgttctttacgccgccgtcatgattattgcgaagtgatttcgctgagtgtaccgccgccgtacgcacggccgcgggccggtgtgcctctggacacgctaagtgcgccgatcatctccgccggttacctggtaatagtaataacaatttttatgcagaactcgataacgaatcgaagtgggttattaagtgatttattagtgtgtgcagtgtttaaattgaaaaattgcagttttcttatggtaaagtgcagttttaatgttaatgtgtgttcaatctgtgggtaaattatggtaccggtaactgctctattcatttatataaacattttaatcaaagcctaagacgn

SEQ ID NO: 1390 - DNA, 542 bp, Ctenocephalides felis
  misc_feature (536)..(536): n = unknown
actctattagcgatactattataatgtaaaaaagttacaaaactttgaaaacgaaatagatttttttatgttcgttatggatatatccaatgtcacagcacatgtaaaaattacacacgacaatgtaatgataatatttaatcttaatttgaaaagatattgatttatgaatatgaggaagctgtcacaagcagtaaatcgcgttgtctaatactaaaatatattatatcactttatattaaatttcattctcatttcttataatccttaaatgtttttatagagactcttcacaactggatttggagcagaaacatcagaagtacatattattaagtctggtgttccacaaggaagtactctaaagccaattttgtactctgtatacacacaaaatatttaagtaactattgaaacttttgccgtatatgcatttgtcatgaggattcacgaaagtgcatcggtggcgacggcaaatgtttaacaataatatgaattagtacttaaaaagtagcttataagtagaaaataaaaanaatgaa

SEQ ID NO: 1391 - DNA, 542 bp, Ctenocephalides felis
gccgactcatgtctcagtttgaggttagaatttattaagtgaaaacatggtcccacggtcgcagtgttttacttctattttggcggttgcgcccaggctgttgccgttcctgataacagcggtttcatatttcgtacttgctcttccgaaggatcagccgtctgttctggcagtgatagtaaaatgcactcctatttattgtcttatttattttgtgttgaaagctggagtatccactaataaaaacaaattggcattggcacttgttttttcgagtattggtgatgcttttctggtgtggaaggagttttttccacacggaatggccgctttcggtgtggcgcaggtgatctattttactacttttgggttcaaaccattaaaacctgttttaggtgctatttggtacttagtaggaactgctttggttgccctagttttttcaaacctcaaaggcatttactgtatggactgccatctaccagttcttttagttacaatgctttggagagctccgccagacacagttgatgataaggctg

SEQ ID NO: 1392 - DNA, 542 bp, Ctenocephalides felis
  misc_feature (2)..(2): n = unknown
  misc_feature (493)..(493): n = unknown
  misc_feature (497)..(498): n = unknown
  misc_feature (506)..(506): n = unknown
  misc_feature (517)..(517): n = unknown
  misc_feature (520)..(520): n = unknown
  misc_feature (527)..(527): n = unknown
cngctatgatgatgaattgtgaaccagcttacagctcccttttgcctgattatgaagaggctgtcaaacaatcccaggatattccaccaagttatcaagctgctgttgctagcgctgggttaattgaaaaagaggctgctgcttcttctgctgatgcaactgaggaaacgaataagccagagactgagcccgccaagacacctgaaccggaaactaccacaaaaagtgaaccccataatgtgtaaagtaaaaaattaattttaaatcaactgaaataaattgcataaccgaattgaaattttcatctgcatatgcatagatggcaattagctgacagacatattttgaaaatataactacatatatgtattaaacaatatataagggcatatatataaatatatatatatatatatatatatatatatatatatatatatatatatagaatatctgaattagttttagggggagatatatatgatgttatatnaaannaaagtgtntctatatgaanaanggggggngcgatattttttaaa

SEQ ID NO: 1393 - DNA, 542 bp, Ctenocephalides felis
  misc_feature (3)..(3): n = unknown
  misc_feature (34)..(34): n = unknown
gantagaatgtattcgtgaatatcaactatacanaagattttgaggttagaaattgtaaaaaaggggttttgccctatatttaaatataaaacgatatagctaattattagtggaacacgactattgaacaaaatcaaatgcaaaaagtaaataataacgatttgtgatgcttgaactgtgattcaaaatgtgaaataggaaggttgtaaaacgaacgtgacgtcttgtgagtgtgtttctaaaactgtgtcagtagtgttttaagtccgatataaaatggatgaagaggagaaaaagaataatattggtacacctaaacataattccttaataaatagtaccggaaaacacacttctgtaacacataatggcgcgaaacataattcacctatgatcatcaacaatggcgtaattatttcgcacaacgattacggcagtatcgttactggaaggagatcgcgaaggattacatcaatggaaggatggcctatcttctcaaaacattgtcctggacttcggcgagttatcatcattgatgata

SEQ ID NO: 1394 - DNA, 542 bp, Ctenocephalides felis
ctataattttattattactaactatgcctattataatcaagaaccgtttaattcaataaattaaattatataagtagcgtaaaatatttttcatttgaaacatttgtgttcgaccaagatatttatgttgattataggtaagagaatactgcaatgatgatggtgtccttttaatatgcttctttatattttgtaataacttttaacttcccgtagggtaagttatagttatcgcaaaaaatataaaacgaatttttttttatatcttcacgtttcagggtttctgaacattttggccatagataaattggcacaccttagaaaaaatggatgagggtgtgtgtatgtattggatacaatttagtccacgattttgggcgcacggatcaaccgatttgaataattcaaaaacattatgttcttttacataaggagacacttgctgattagttttttccaaaggcaggtccagcggtttcggagatccagaacagaatgtttttaaatatgccatttgacggtcgaaaatcagtattgactgt

SEQ ID NO: 1395 - DNA, 542 bp, Ctenocephalides felis
  misc_feature (31)..(31): n = unknown
  misc_feature (498)..(498): n = unknown
ctttattagtcaacggcactgtccatccatngatcatcactacattttattctcgtttctcccgttgttgagttgtttttgtttagttatttttagaattaagtttgtgcaacttttatttcaagtgaagaagcagtattatattatggttataaatggcattgcatgtatgactcacaaaaattaaagaagtgagtgtagcgattgatgatgaattagaaaacgggtggaagtattctgaaggtgcacaagatttgagtgattcagtaaataaatcatccaaaaataagttgaatgactacatgatggcgtcccaattgaatccagaagctgccgagtttgtaccggttgaagcgggtagtcctgcacgatcagtattatttttgagagaaggcttgcttgatgatgtaatggctcgaagtccaagacaatttagtgctgctgaacaagttcttaatgtaccatcggatactgaatttgcatcagaaattaaatcangaccaggagactaagtgcaaatggttcttttgaaagcgataaga

SEQ ID NO: 1396 - DNA, 542 bp, Ctenocephalides felis
cttactttacccacacaacctgcagctcctatatttatgtacaatggaaacattgatttcaagcctgatacattactaaaccaaccacaagtgatatccttgcaaaaccctatagtaaacaaccaaaacacacttattttccatccggtacaaaacaatacgttttatgatatcaaaacattctcacatgccccgacaagaaatgtaccaattgcaaaacagaaacctggtcgaaaacaactggcagctcgtcagactacaaataatgtgcaaccacaaaaaatctttgtgcctaatatgaatacaatgcaggacaagcaacatgtattattgcaagcaaagttaatcaaatcggaacaacatataaacaaaactgttatgtatactactacaccaattgctgtaatcgatgacaaattggctatcaaagatttgtcccataaagaaccaaaagtgaaagaagtcaaacgcagtgccacaatgctatagaacgcagatccggacaagtatcaatgataaaatattgactgaaaatatgatgg

SEQ ID NO: 1397 - DNA, 542 bp, Ctenocephalides felis
  misc_feature (32)..(32): n = unknown
gtgcctttgtcgccatattatttctggtcatngtatttttggtaggattcgcctatgtgatgtaccatcagaaaattttggccaaatcctattttgaaaaagtgcaatttaataaaatgaggagatctttgaagatttatgatgataatggtgatactatcattagtggagagttgggtacaaccctaaggtctgatagggtgtttccttgtcatgccgaggatatgaacttttctgaaaggaagagtcccctatgcctagaatggctgcacagtgcccgtctctatctggatcgcgaagaagacgcttccataatatcctcgcacgtccattccatatccacatccagtggttcttcccaaaattccaacaacccaaaccccacacattccactttgaaatgctatgacgtctcctgggttgcaatttcgccctaccattacccgactgactgttaccagtggactgggcctgccattgcttgcaaatgatacaagagcttcaaaccatttattactgggaaaaactggggaaatgtctga

SEQ ID NO: 1398 - DNA, 542 bp, Ctenocephalides felis
  misc_feature (3)..(3): n = unknown
aangtgcaaaatgatgatatcgattttactatttacatttttgagtgtatttcatttaggatcatccctacaatgttaccaatgcgacctggcaaataacccggcctgcacggcgtctctaaattccactaaagacattgcagccgtagaatgcggaaaacttcctcaacaagttagtgaaaatgatcgctccttaatacgatttttgccaccaaatttcgatggacacttgtcaaccaccagggaaggagtcggatttcaatgcgcaaaaattgttgccacgaataacattcagggtggttataatatcacgagaattcttcgaacatgcattgtcgataccttaaattgcgagaaaattaatgaagacttaaaacaagaaggattttcttcaatgatgtgcgcaacttgcaacacaaatttatgcaatagttctacttctttaagcatcacaattttattaccatttatattatttttaatcacaaaagcccgtcttagggaaataatttgagttagatgaaaattttcaaagtctttca

SEQ ID NO: 1399 - DNA, 542 bp, Ctenocephalides felis
  misc_feature (3)..(3): n = unknown
atnaatgttaatgtattttaattaattacatgtcattaaaatattgaacagttttagaaggttgtaataaataaatcaactataattttagtgtgcgcaatgacatctgtcaagttattttctaatattctgtctaaataaatgagaaaaatccaaaatgttcaaaatggagggatgctatttgtcaggagggggtatgtaataacagctatctgaatcgtcacatttctcatagcattctggtggtatagtgatgggttctcggacaggagcggggcaaataggataattatcttcaagttctgaatcttcagaagattgttccttttctataatttcatcattttaatttaatttgtttgcacacaataaatggtttacaaattgaaaactaatgtaaaaaaattatgagcaagttttctgaaaattaaaaataaaagatgacttaatttagtatcagtgtcatcggtttatggagtaacatccaatcatgcaaataaatgattaattatgaccatgccagagacagatttcacatgaat

SEQ ID NO: 1400 - DNA, 542 bp, Ctenocephalides felis
attaccaagggagagggggttccagaaatccttaaaaaatttatcatgtgaccaatggacgcccccttaggattaatatgcagtaaaagtttttttattcttattttattttaaaaaaatgacaatgtatgtggttccacaataaaaaacgtaacgattctattttattaccttatttttttgtggaattttgtgaaactatttcacaaaatttttgtacgatttatcttcttgctttctgattgtatacttttgatcttagttttattccacaatttaacagcctcatacaaatgagcatatggacgtgatgtcactattttatccacttaaaaaaaaatggacctgaaaatagatcgagttctatattgttcccattttatccaaattgacttcccatcaaagtcggtggtaagttcttggttaaagatttaatggaagctttttgtatttttttttcttgtggaatcgacatttacaaattgttgactaaattcctcttaatttcttaaattggaatcagctcataaatcaatgtaaaa

SEQ ID NO: 1401 - DNA, 542 bp, Ctenocephalides felis
  misc_feature (2)..(2): n = unknown
anttcggttgaattgtagcttcttacttgaaatatattatcttgtgtgccttactacattttgatatacaaaacattcgattcatgaaagatcattccataaaaaccataatgtatcagtattatcaaataataaaatttttaataattttaactaccgctgattatatttcattgcttttttgtactgtgcagcataatttaataaaatataagcacctaaagcaagtcatatacagtactacatatgttgaagaatttgatgaaagcaatcaatttttgatttgtaattgatttaaatatattatgttaattaatttgaatatatgtattagattatagattgttcattcgtattgcagaaatacgaattgaaaaattaattatttaattaaagatctataaatttcgtccaaaacttaatcactgattcaaaatttgtgcagtagttgcacatatttattttatatgtaatttagatgttattttttgcatattcaataggatagcttttttacaaaaaatattatgtaatcaatataa

SEQ ID NO: 1402 - DNA, 542 bp, Ctenocephalides felis
  misc_feature (3)..(3): n = unknown
  misc_feature (501)..(501): n = unknown
aanaaacgagcccactggctgtctatcaaaaaaaaaaaaaaaaacgagcccacccatcaaaaatttggttccgacgccactgcatagattctaactaactaaatacataaaatacaataagtactacttactttatatattattaagtttacttacaacaatatttttttatttattactttttttatattcgacttctcagattatatatattattaaaatttattattcgatgtattattacaatcgtgccataaattaaaaaatatgagtatcgcttgtaaatatattagttaccagttagatgtaatttttgtactctcaaattttaatcgaaaccaaatttttgattattattaataattgataagtagttttaattaaaatagttggacgtttgcatctcagataaattatattaattattttataagttatgtatgcattgtaataagtcacacttctataaattaatttttaatcaaattcttggtataatgngaaaatttaataagctcactatatatttatgcttatatata

SEQ ID NO: 1403 - DNA, 542 bp, Ctenocephalides felis
atgtcgtcgaaatgggcaaagtcggctatcaaatcagagttcgttggttggtgccgtcgcgcttcgacttacttttatttcatttattaaacgcacgttcattcattgaatcggaaaacatggatatggagagacagtcgcttcatagttacactaaacataacctaaaatattggtgtataactaaaagataacgatattataatgtttcgagtgaaatttttgttataagttctgtgtattaaattaaataatagtttagaccgaagatatcacatttgtgtcaaaatgccaaatgtcaatgtgacaaacggtgcattaaaatgaatctcataacctctgtgtatattttggttcttagcaaaaatttagtgtacgctgatagtggatatgtgtaaattagacgttactagaaatttttgattttaataatgagtattggtaaaatgtgtacgcaaacgagcgtctactagttggacgtatgtgataatggctggtgtcggacatagatctagcaacgctcacaaaagacgtcttaacga

SEQ ID NO: 1404 - DNA, 550 bp, Ctenocephalides felis
acaacatcccataataaaagcattgtacagcctagtggtaatgatcatattcgagggggtaatgttgctccacctagaatgcaagatgttgtccgtccaaaaagatattcttgtcaaagacctggtggtattgtaccagaaacaaacatgcaaggccaaccgcagcaacaacaacctgtatatcaacagaactactatgcaactgaatatactccgcctgtagcaaatgaacaaaataattcacatcaaggacaacatataccacaagcactaaatgggatgccccaaccagggggtcaggttgtacctcctaatatttctgtgccacccccgcaaacaatgccttatgtaccagaaccagttcctacacaggtcataaccactagtaatcaagtgatgccgcaacaagttcttgccctcaatatcctcaagttctatgcagtttaattcgggaggaccctacatggctcaaataatacttttatccacaatctttaggtatctgtcctctctaacatgcaccccacacaatatctcccaatccctcata

SEQ ID NO: 1405 - DNA, 550 bp, Ctenocephalides felis
cacatatttttcaacatggaaggacgtgtgtgtcgggctcgattaaaaaaaacgtggaaattaattatctcataatggtgttagtttcgaaaggctatatttatatatgtagacgccagcctaccattttggttgatggcgatgatctgatattacgataaggaaaaatctggaccacgagataactgtaaccgcgccagttaactcgttcaggatgtggtgtaagtactgccttcatatattcctgataaataattttcatgatgtttatcgtgatccgagggctgattgtttgtgaatgttaactctttgactgaattaatgaacaccctctaatttattatggaaatctctacaatcttgtaatatttacatgattgtattacagtttatgctgtctgagcatagagaagcacctggaaccataaatggcttcttgaaaacatgcatcacatctcatgtctacacatgtatcctgcattgatgagaagggtgtcaaatcacatccatacataatgatgtacatatatcctgcattagtgaagagaga

SEQ ID NO: 1406 - DNA, 550 bp, Ctenocephalides felis
  misc_feature (2)..(2): n = unknown
  misc_feature (14)..(14): n = unknown
  misc_feature (22)..(23): n = unknown
  misc_feature (28)..(29): n = unknown
  misc_feature (35)..(35): n = unknown
  misc_feature (38)..(38): n = unknown
  misc_feature (44)..(45): n = unknown
  misc_feature (50)..(51): n = unknown
  misc_feature (54)..(54): n = unknown
  misc_feature (58)..(58): n = unknown
  misc_feature (61)..(61): n = unknown
  misc_feature (65)..(65): n = unknown
  misc_feature (69)..(70): n = unknown
  misc_feature (78)..(78): n = unknown
  misc_feature (81)..(81): n = unknown
  misc_feature (86)..(86): n = unknown
  misc_feature (88)..(88): n = unknown
  misc_feature (92)..(95): n = unknown
  misc_feature (98)..(98): n = unknown
  misc_feature (103)..(103): n = unknown
  misc_feature (111)..(111): n = unknown
  misc_feature (116)..(116): n = unknown
  misc_feature (127)..(128): n = unknown
  misc_feature (133)..(133): n = unknown
  misc_feature (137)..(137): n = unknown
  misc_feature (143)..(143): n = unknown
  misc_feature (154)..(154): n = unknown
  misc_feature (161)..(161): n = unknown
  misc_feature (175)..(175): n = unknown
  misc_feature (183)..(184): n = unknown
  misc_feature (186)..(187): n = unknown
  misc_feature (189)..(189): n = unknown
  misc_feature (191)..(191): n = unknown
  misc_feature (201)..(201): n = unknown
  misc_feature (209)..(210): n = unknown
  misc_feature (221)..(221): n = unknown
  misc_feature (230)..(230): n = unknown
  misc_feature (232)..(232): n = unknown
  misc_feature (237)..(237): n = unknown
  misc_feature (240)..(240): n = unknown
  misc_feature (250)..(250): n = unknown
  misc_feature (252)..(252): n = unknown
  misc_feature (256)..(256): n = unknown
  misc_feature (262)..(262): n = unknown
  misc_feature (284)..(284): n = unknown
  misc_feature (287)..(287): n = unknown
  misc_feature (302)..(302): n = unknown
  misc_feature (309)..(309): n = unknown
  misc_feature (311)..(311): n = unknown
  misc_feature (316)..(316): n = unknown
  misc_feature (321)..(321): n = unknown
  misc_feature (324)..(324): n = unknown
  misc_feature (326)..(326): n = unknown
  misc_feature (336)..(336): n = unknown
  misc_feature (344)..(345): n = unknown
  misc_feature (353)..(353): n = unknown
  misc_feature (355)..(355): n = unknown
  misc_feature (358)..(359): n = unknown
  misc_feature (369)..(369): n = unknown
  misc_feature (371)..(371): n = unknown
  misc_feature (376)..(376): n = unknown
  misc_feature (378)..(381): n = unknown
  misc_feature (384)..(384): n = unknown
  misc_feature (387)..(387): n = unknown
  misc_feature (390)..(390): n = unknown
  misc_feature (392)..(392): n = unknown
  misc_feature (395)..(395): n = unknown
  misc_feature (406)..(406): n = unknown
  misc_feature (432)..(432): n = unknown
  misc_feature (443)..(443): n = unknown
  misc_feature (453)..(453): n = unknown
  misc_feature (456)..(456): n = unknown
  misc_feature (474)..(474): n = unknown
  misc_feature (483)..(484): n = unknown
  misc_feature (486)..(486): n = unknown
  misc_feature (512)..(512): n = unknown
  misc_feature (515)..(515): n = unknown
  misc_feature (515)..(516): n = unknown
  misc_feature (519)..(520): n = unknown
  misc_feature (526)..(526): n = unknown
  misc_feature (535)..(535): n = unknown
  misc_feature (540)..(540): n = unknown
  misc_feature (549)..(549): n = unknown
cnacattgcatggnatactgtnntcttnngcgggnttnttggtnngggtnngtngatnggnaggnttgnnggctcgtnacnagacncnttgnnnncgntcaantagcccangattngtttctcacannattgntggngtgttnttctctgcctnaaagacngatacacatggatntatgtcgnngnnantncatgtactgncggccagnnttgtaatttgngacaaggangntgctnttncaaacctgancntgcnattctncacgcaccatgcaatgcgacancanatgaattgacctganccctacnantgcanaaggngtnanttctgtctgnaaacgganntgatggantnttnnaagaatgcgncngtaanannnnatnctntgncnganctggacgtgcncttctgcttggataccaactttaacnagacctcgccnatatgtcatnaantgagaacccgcttgccangacatatcnntnttttctctgaaaacagaacatttatngtnnaanngctatncctcaggtntaaancccatcgang

SEQ ID NO: 1407 - DNA, 550 bp, Ctenocephalides felis
  misc_feature (32)..(33): n = unknown
  misc_feature (532)..(532): n = unknown
gtcaacagcgaacagcgagtctcggccgcggnnctctacaatcattaatgatacgcacgcacgccacgtaactgggcgcagatatcgcaaaaatacataacaggagtaatagtatagtaatagtatattcatttgaatagacttgagattgagacaaatagcgcgcgatctgcaagtcattgtgaccaacctttgacgtttagcgaattcatcgtgtatgtgttttggaatcctattattgtgtgtgtttgtgaatttcgtgttttattaccgtgtgaagttgtattcaggtgctctaacactaagtgattttcaacaaagattttttaagaaataaattttaatcaaaatcgaatctgctacaataatccggctgaaccagtagatgaccttgacaacgagtttgattcgtagcgattaacgaacgctgccggaccttccgaccaatactcacggatttattttgattaaatgagattctgttataaggtgacgtctagaaatagatgcagatgtgtaaccttgtttgcgnggcagagaaactgtgtcg

SEQ ID NO: 1408 - DNA, 428 bp, Ctenocephalides felis
aaaaaactattttatactgttacgtaaaacatgtttcaaagtacagttatagtttgcagtgcatggtaaactactttggttcttatttaatcggatgtttaattaacagatatccaaagatgtaacttcaactttccaatctagtacaaagaatttttttgaacaaatttatggaatgttcggatttcgattcccaaccaccaccggatgggattttgcaaatcccaccaccaccgccaccgccagaaccaaaattttatgaattgtgcgaaaaattggaagaagatcgccgaatatcgatgtatgctcttgaaagcaccccaggcttcaccatgtacacagaccactggtatataatattgattgtgattttagtagtaattgtatcgataataattataatattcctcaaaaaaaaaaaaaaaaaa

SEQ ID NO: 1409 - DNA, 455 bp, Ctenocephalides felis
tgaacgtccagaaccaaatgatgaagatttctgaaaatctgcgcgcgtaaaacaaataactaaggttagacatggaaattgtgaagtatgtcacaggcacgccgcacgggacacctcacattcagccattcagggatcatacaagtggcgaccgtgcgaagcgcgagccctgcgtgaacgcgcgaaccttccgccataatataggtttcagtttaaatttatagtatcatttcaaatttaacttttagaacagaacaatgttcaaatactatatctgagtattatctgaccaatactgctagatctattacacttatgcagtcatcaattagtacataaaagaaaacaatataagaaaaaaatattattttcttgcattattcaaaagaagctatgtaaatattaataaagcataaatagaaagattcacataattcaaaaaaaaaaaaaaaaaa

SEQ ID NO: 1410 - DNA, 550 bp, Ctenocephalides felis
  misc_feature (33)..(33): n = unknown
  misc_feature (505)..(505): n = unknown
gaagcatttcatctgtcgatcataatctagtcnaggtggaaaaatgaaaatcgttctcttaacaattggctttttggtcgcggtcgtgtcttcaaacacgatctcattggatgaaagttttgagtcaagttttaatgatttaaaatcactcgagagcagaggggcattagaaaataaactattagcagctgctgaagatctgagaaaaactttaagaaaaggtggtaatttgactaatggcgaagttatggacccatggttccttgaaaatgttgatgctgacattgaactaccaaacattgccaagctaaacggagctcttgccaacgtaacagttgatggtttatctagtttcaatataaatcacataaaagtgaatgtgctcttcatgaaagctactttcaatatcacttttgaccatctcatggcaaagggtctatacgacattgaaggcaagttggcagatttggctaagttgttggcaaaggttcctttgatatcatgnacgtgattaaacgctgtggacatgtcaactatggttgaaaggtta

SEQ ID NO: 1411 - DNA, 550 bp, Ctenocephalides felis
gtcggtcaattctacttaatcgctgtgcaattatattgtaacttgtaaataatcgttatgctatagctcagtgtcgtagagttattttgatatgaataagtcataagttctatcaagatataaaattattgcctaatatcaatgatcaccaaacaaatagtttttaattcgttttttatttaattttaagagaatattattatgaatatgttaagattatataaatagttatgaacgtttttcttaagaaatactcaaagacataatatatacaaacttcatataaatctgttcttaatataaaacttgttaagagattttgtcatatctataaattttatttacttcgaaatactattaaattgtgcataaaattatttgatatacagtgttctttttaatatccacttttattattttaaattcatatagtattttcatattttatgttaataaaatatatttaatcagacactaactcttatttataataatatgtacatttggtctcatgatagaaatactgtgatgctaaaaaaaatggtgtcgg

SEQ ID NO: 1412 - DNA, 550 bp, Ctenocephalides felis
cgccaacgtctatttaaaattttgatatgcaatttgtgttaaatgcgttgtaaagaaaactatttatacctatttactgttgtctttattttgcttcatattttatttttcggtatccataaatatcgttgtttgtgaaaatttgtgtgaaaaagtctattaagcatcttcaagtttggtatggctaaacctcacctgaagaaagtagcgttcctgaggacccgctatgtcacagcactaaaattaagatttttcttctttgtgacaataccagtttgttatttggtatttacagcgttaacaaaacaatccgtttcttctgaagatattgaatattacccgcagacaccagaaattactggatcgcggaaattgcttggctatctttcaccgatgccaagaattcgagcctggcagatgatcatggtcataactgcacgcccgcagctatcttagattttccctctgatggattcaccagggagcaaagaagacagggctgggcctggtccatgccgcatcgatctactgttctggctttagcatagtt

SEQ ID NO: 1413 - DNA, 550 bp, Ctenocephalides felis
  misc_feature (548)..(548): n = unknown
ggaagttaccagtatggcactcctacattatatccacaaatggctacaacagcaaatgcacatggttcaacaactaatagtggataccccaagccttcttattctggttataatgcaggttatgaatcactaagccaaagccaagattatacaaaacccagtggttcttatggtccaggaggaagtgttagcggtactacagtggtgcctcaggtatctggcaaatccaacacaactacatcggggagtgttggtccaaacagtcagggtgctaatgtgcagacaggtgcaaataacacagatatagcaagcgctatgtataataaaactcatacagcattaaataaagttaattcttatgagaagcaaacatttcattcgggcacaccaccaccgttcaacatgccaggaagtggttccagtggtactacttatggggctccgcatttatttataccaacaatggcacctcaccaacaagctcatcataatacacagatgctgatcagcctttgatagattatgggggccttcacaagtagtcacangg

SEQ ID NO: 1414 - DNA, 550 bp, Ctenocephalides felis
  misc_feature (488)..(488): n = unknown
  misc_feature (512)..(512): n = unknown
gttattcttaaaaagctaagtagaaataatttatctttatcagttcaattgatttacatgtgaacatgattaacatattatcttttatcaattttaatgttcaatgtgatgtttagtgtaaattttaagttatttttttaattatgatcatatctttttattcctacatgtctttcattttagtattgcatataatttttagtaaaaaccccttttcagttacattaatgttttctgttgcatgctactagagaaagtagttcattctaatttaatgaatgttagtaattgaatgcttgtttagtgttagtttttgagattgaccaaaataacatcttttctatctgatcatattctgtgtatttttatataatttatactaacagcttgcttttaataaccgtttgaatttagtttgttattgttgtgatcaaaacgataatttgcatgtcttcaaaatttctttgccagaaatttggaaaaaagtnttcttatttatgaccaatttatgntgagtctaattgggtttaataatatttaattctggaca

SEQ ID NO: 1415 - DNA, 550 bp, Ctenocephalides felis
  misc_feature (499)..(499): n = unknown
  misc_feature (525)..(525): n = unknown
cagagatgaatacaaatttttaactcaatatggtgtaatcataattttctaaagttaatcgaattcgaacgaagtgataagtaacattgtgccaaaatgtcaatcttagccattgattttagtggtctggggcctcgaaaatctgtttttgttgtcattataatagtaggatgtttttctattttatggccaaaaatatttcatcccatgtttatgggatttccagatcaacaaattatgccaaatgctatggacagatacgcaggttgctgcgatgtgatattcagcagcgatatgaacgctctgatgacagtaactaatttatgtgcccaagtgcttaaatttcaagatttcaatgaaacaaagttattgggctcaaacgtgaataatagatgtagggccgaaatattatcacgctgcggcctggcatattaccggtattttcatccggaaaaggtggtccagatgttaaaggagtgaaacgccttcttacgagatngttcgcttaatggctcatcttgcctnagtgagttcggaatcctccatggct

SEQ ID NO: 1416 - DNA, 549 bp, Ctenocephalides felis
attaaaaaaaaatctcaaatcgatcataaaagttttaatattaatttcagtaattaatacaacttctggatcagatgctaacaaatacgaagccacctgggagagtttggatagcagaccatctcccagttggtatgatgatgccaaagttggaatatttttacattggggagtttatgcagtaccaagttttggcacagaatggttttggcaaaattggcaaggatctaatgtgtcctcctacgtggattttatgaatcagaactatcgaccgggatttacatatcaagattttggtacagaatttactacggaactgtttgatccaaaccactgggctgagctattccaagcttctggggctaaatatgttgtgttaacaagcaaacatcacgaaggatacaccctgtggcatcaaagtactctttcagttggaactcccaggacgttggtgctcataaggatttaataggtttactaccaacgcaattcgcagcaaaaccaactacgtttcgtctctatcactcttgtcgatggtcacagacttat

SEQ ID NO: 1417 - DNA, 549 bp, Ctenocephalides felis
gtgtattcatattaaaaactgctgaatccacgtgtgtataatgtcagacgcagtggtggcaggaagtggcggacaacctaattctggacaaatcaagaaagaattatcggaaggcattatataccagaccgcagaaagtccaggatcaacatgctgcacagcgctgtattccgatgtagaagtgataaagatggaaatttcggatcattttgaagttgttgacccgaaatctctacagatagcaaatagtccgggtagtccagatagacaattctgcagctcaaccacggcgtcaattggggaaattacgacaaacgatgatattaaagaagacagtccaaggcgtctttgccttgtttgtggtgatatagcctctggattccattacggcgttgcctcatgtgaggcatgcaaagcattttttaagagaacaatacagggtaacatagagtataattgtccggcagttggagattgtgaaatcaataaacgaaggcaaaagcatgtcaagcctgtcgattcaaaaatgttagcattggatgtaaaaga

SEQ ID NO: 1418 - DNA, 549 bp, Ctenocephalides felis
  misc_feature (541)..(541): n = unknown
gccgtcaaaaatggctggagtattatttcgtgttaatttggctaaaacacaattgggcataatcagcccagtttttacaattagacataacagcggtggaccaccaccaccaggcactccacctccacaaacacgtactaaatttggtcctcttaaagatgaagacagaatttttacaaatctttatggacgtcacgattggagattgaaaggatctttgaaaagaggagattggtataaaactaaagaaatcattcttaagggagctgattggatcataaatgaaattaaaacttctggactcagaggtcgtggaggtgctggttttccttcaggtttgaaatggtctttcatgaacaaaccaggagatggaaggccaaaataccttgtggttaatgctgatgaaggagagccaggaacatgtaaagatcgtgaaataatgcgacatgaccctcataaattggtggaggctgttaattgcaggaagagcatggcgctcgactgctcattacatagaggagaatttatatgaacatcaatntcagttgc

SEQ ID NO: 1419 - DNA, 406 bp, Ctenocephalides felis
gttaatttaaaataacaaaatgaaaggaacattattaatattatcatgtcttgtgatcatgataagtgccgaatatgctgacgtagatgtgtgccaagatttggacgatggaacttttcttgctgattcaaacaattgccaaaatttcttcatttgtgatggaggccgagcttggaaaatgtattgtccaggatcacttttatggaatgatcacgaaggaacatgtgattacgcacaaaatgtagaatgttaccaaccagaataaaacattttaatatctgacagcgattttctgaaactatatttcatactactgttataataaatttatcttcattgctctcctcctataaatttattccgttttaataaaatcaatataaagacaaaaaaaaaaaaaaaaaaa

SEQ ID NO: 1420 - DNA, 549 bp, Ctenocephalides felis
agaacagaagtatatatgatgagtatcagtgcaatttaataatgagagaacgttgtttcaattttattagtaccatataccatataatgaattagtagaaaaaaaattgttgtagtgttttagtattttcggacatcaactcattaaattcataatgtcttcaggtagacctataaaatgtgttgtcgtcggcgacggaacagtgggaaagacatgcatgttaatatcatacacaactgatagtttcccaggagaatatgtccctacagtttttgacaattattcagcacctatggttgttgatggaatccctgtttcattggggctttgggatacagctggacaagaagattatgatcgattaaggccgctgtcttatccccaaactgatgtatttctcatatgttttagtgttgcaagtccgtcatcttttgaaaatgtcacttaaagtggtatcctgaaataaaacatcactgcctgatgcacctataatcttgtggaccaaaatagattaagagacgatagagaaaccttaagttctctacagac

SEQ ID NO: 1421 - DNA, 549 bp, Ctenocephalides felis
  misc_feature (524)..(524): n = unknown
  misc_feature (539)..(539): n = unknown
ctgataccatcgaagccagtgctgattcatgacttgggtcgtgtttatatacaaactggtcctgatgttaagaggtgcattcttagattattagagggaccagttagacaactcggcatggaaaatactgaattgatgaaattagttgaggcctgtgcaaagggatctgaaaccttggttacaagggtgatacatattttgaccgaaagaagtttgcctagcatggaactagtttctagagttcgagatctttatcacactaaagtatctgatgtccgattcttaataccagtattaaatggtcttaataaagacgaggttatagattctttgcccaaattcattaaactaaatccagtagttttaaaggaagtttttaataagctgctgaataatcaagcaggtcctacatcatatcctagtccagttacacctatagagttgttgtagcgtacatacaatagacacaactagtgcagatttaaaattcgagtgaaagcaacaagttgtgttagcagagaagnaattacacccagaangatgcagagt

SEQ ID NO: 1422 - DNA, 534 bp, Ctenocephalides felis
  misc_feature (4)..(4): n = unknown
tgangatcggcttgtgcgcgtacagtggatacaaaatttatcccggccatggcaaaaccatggtcaaaattgatggaaagacattcactttcctcaattcaaaatgtgaggctgctcatttaatgaagaggaacccacgtaaagtaacatggactgtcttgtacagacgcaagcacaagaaaggtcaagaagaagagttgactaagaaacgtactcgtcgtacacagaaattccaacgtgctatcgtaggagcttctcttaatgacatccttgccaagaggaacatgaaacccgaagtacgaaaggcacaaagagaccaagctatcagggctgcaaaagagcagaagaaatccacgaaagcagcaaagaaggctgcagctccacctaaagtgaaagccccaccaaaagctaaggccgctaaagtgagccagaaagcacccccagggttggcggtaaacgataagtggtgttggagattattctaatgtattatatgaaaaataatttgtaaaatgctaaaaaaaaaaaaaaaaa

SEQ ID NO: 1423 - DNA, 549 bp, Ctenocephalides felis
tgaaaaactacgatccccagaaggacaagcgtttcagcggcaccgtaaaattgaagcacattccacgaccaaaaatgcaagtatgtattttgggagatcaacagcattgtgatgaagctaaggccaacaatgtcccatggatggatgccgaagctctgaaaaaacttaacaagaacaaaaagcttgtgaagaaactagctaaaaaatatgatgctttcttagcttctgaatctttaatcaagcagatcccccgtttgttgggtccaggtttgaacaaggcaggtaaattccctggtctcttgtctcatcaggaatccatggtgcagaagattgatgaagttaaaggaactatcaaattccagatgaagaaggtgttgtgtttatctgtagctgtggtcatgttgatatgtctcctgacgagttggccaaaacgttcacttgtcaattaacttcttggtgtcacttttgaagaagcattgcagaatgttaggtctctcatgtcaaatccactatgggcccccaaagatatataatacataatgatatgtt

SEQ ID NO: 1424 - DNA, 549 bp, Ctenocephalides felis
aaaattcacattttaatcacaattaatgtctagtttctaaaccacaaggaatatacttataaatatatttatataaatataaggaactgaataatctttgatatttggttgtttgggtatttatgttgtacaattaatatatcctttaccctaaagtctacatatattatcaaccatgggtaaagcagaagtaggtacccccaagtacatagccaacaaaatgaaggccaaaggcctccagaagctccgatggtactgccaaatgtgtcagaaacaatgcagagatgaaaacggtttcaaatgccacacaatgtccgaatcccatcaaagacaacttttaatctttgctgataactcacacatgtacctagatcaattttcaaaagaattctctgcggcttcttagaacttctgagaagacaatttggaactaaacgagtggtgctaataaagtgatcaggattatatatctgataggaatcatttgcacatgaatgctcaaagtggtgcattgcggggttgcaagtggttggggaggaaggcatgcgt

SEQ ID NO: 1425 - DNA, 549 bp, Ctenocephalides felis
  misc_feature (472)..(472): n = unknown
  misc_feature (524)..(524): n = unknown
gcaagttagggatcttgatattaacactacagaaagacttaaaggtgttatggatttagtatttgaaaaggctgttgatgaacctagtttttctgtagcttatgcatatatgtgtaaagagttagctcttatccaagttcctgctgaccaacaaaacggtcaatcttcaactgttgaatacgtcaatttccgtaaattgctcttatcccgttgtcaaaatgaatttgagaaaaatacagtagatgaaaccgcaagagaagttaaactgaaagaaattgaagcgtgtacagaccctgagaagaagaaggaactacagtttaatttagaagaagaagagcgaaagattcgtgttaaatctgttggaaatgttagatttattggagagttattcaaacaaggtatgttgccacaaaaattatgatgcagtgccttaggatgctctgcagtcaattgaagaagaaagcctcgagtnctggcaaattgtgcgacattgccggatttagaaattacaaaatcaagatttnaacctctttcttaaaatgcaagaat

SEQ ID NO: 1426 - DNA, 549 bp, Ctenocephalides felis
cgccgtcagcagcacccaggccgaatctttctgtatctctctgggtgtcgggcctctgtggtggtcctgatgatttccaccacgagataggacatagcccaccaccttaccatgaagacgacgaccagctgcggcacacccgcaaaagcagcataagtgatagcgattcagaagacgattctattgatacttcgccggattattcccagaacgcggatgtcgatgagttacttcaccttggcaaaccagtacgcattacattcgaactacggctcacgaagcgcaacagcacgctatgggagacagttttgaaggagaacgtgctctatgtaaatattcctaatgtattgccttctgaggggtctcgtgaaagtttcacggcgctcctggaactgaccgaggagaagttgggatgccattcgatggtgttgtgcatgcgacgcgatcgttcagacagacagcagctcatgcggcattcatgttcctcgggttccaactgtgcaccaaacaacaagctaatgcaccgaaggtcacgatgatatttgatct

SEQ ID NO: 1427 - DNA, 549 bp, Ctenocephalides felis
  misc_feature (503)..(503): n = unknown
atttgtatttatgatttagatttatagtgcattaagatttgtgcttcaaaaatgttatcacgtgcctcatatacttcatctgtattcttaaattcgctgcagcaatttcgtttacaaagcacattagtaattgctgaacattcaaatgcaaaattaaacccattgactcaaaatgctttaacagctgcatcaaaaattggaggtgaagtaacagttttaattgctggcaaaaattgcaaaccgcttgctaatgaagttgccaaagcagcgggtttgaaacaagtcttattagcggaaaatgctgcatttgaaaactgttctgctgaagccttgacaaaacttgttgttgcagttcaagagcaatataaatttacgcatattattggtggtgcaagttcccttggcaaggctgtattgcaagaatagcggcaagttagatgtttccctatttctgaaataattgatgttaaagatctgaacattcgtcgacaatttatgccggnacgctttcagacactgaggtgaaagatccctaaagctatcttcgtg

SEQ ID NO: 1428 - DNA, 555 bp, Ctenocephalides felis
  misc_feature (5)..(5): n = unknown
  misc_feature (531)..(531): n = unknown
  misc_feature (552)..(553): n = unknown
rchsncggaaatatgagcatttacgtcagttttgtatggaattgaatggtttagcagtgcgcctacaaggacaatgctttcctgaacaatgtacacaaatgactgcaactgaacaatggatatttctatgtgctgcccacaaaactccaaaagaatgcccagcgatagattatacaaggcacactttagatggtgcagcttgtttattaaacagtaataaatattttcccagtcgtgtgagtataaaagagtcatcagttgctaaactaggttcagtgtgcagaagagtgtatagaatattttcacatgcttattttcaccatcgcagaatttttgatgaatttgaagctgaaacatatctatgtcatagatttacacagtttgtaacaaagtacaacttaatgtcaaaagacaatctgattgtgcccattttagaggaggatgcaactatcggagaatcagaggcttaagcatttatgttatttatttaaaatatctgtgcatgcattttttatttttcttgtgagtgancgtttattaaatcattatgtnnat

SEQ ID NO: 1429 - DNA, 549 bp, Ctenocephalides felis
gtcaactgggtcactagagtagatctacgagacaagaaaatcgaatatattaatggcctaggatactttaaagatcaaaatactattatagctgtattaaagaataaaagtgaaaaaatattgtctgccaaaaatattgttatcgcagttggaggacggcctaactatccagatattcctggagcactagagtatggaattactagtgatgatattttcagtttagatagagaacctggaaaaactgtagttgttggtgctggttacattggacttgaatgtgcaggttttctgaaaggattaggatatgatgcaacagttatggtccgctcagtcttattgcgtggatttgatcaacaaatggctaatatcattaaggaatctatgattgaaaaaggagtcaaatttttagatacatgcattccaaaatcagtagaaaaatgctcagatggcaaacttcttgtacttggtaaatcttctgataatcccacattcagatgtatttgatccatttgttgtatcggaaggaagcttaacaaagattaaaat

SEQ ID NO: 1430 - DNA, 549 bp, Ctenocephalides felis
attgccttaacgctggcattttaaaatccgtctatttgggatcaaactcattagatggcgatggtacatactacgacgtcgaacgttttgtgatgcatgataaatatacaccaagaatcactgtcaactatgctgatattggtctaataaaagtggcaaaagacattgtattcggtgacaaagtccaaccgatcaaaattagcaagagaaacatcaagggtggtgaaatttgcaaggcaactggttggggtctattaggttctgtggactcagtaccaaacgaattacaacaagtagaaaccactgcaataacaaacgaaaagtgctttgaattgactcaattcattgacccaacttcgcaaatatgtacattcagggaatttggtagaggcatttgctttggtgattctggtggaccactagtttacaaaaatgaacttgtggcattacatcgatgcacttatctcctgcagaggtggcaggcagatattttgtgaagtgcgagatttccaatcctggattaattctgaaattgaaaaaataaataga

SEQ ID NO: 1431 - DNA, 549 bp, Ctenocephalides felis
gcccagtgcacgaggagcatgaggaaccagatccaagaagaactgagcgcttcgatgcaatacttggccatgggggcgcatttctcaagagacactgtcaacaggccaggatttgctgagatgttcttcaaatcggcaagcgaagagagggaacatgccatgaaactcatgtcttacttgatgatgagaggagaactgaccgagaggctgcaggacttgatcagaacaccaactgttccaatcacgacttgggctgatggtttgagtgctttgaaagatgctctgaaattggaggcttccgttaccaagaagattaaacatgtgatcaaagcttgcgagaacgataatggagctaatgattatcatttggttgactacctgaccggtgaattcttagaagagcaatactctggtcaacgtgacctgccggaaagatctccaccctgggcaagatgatgaaccaacaaggtgttctcgggagttcttgttgacaagaaactctgggttaaatgaaacatacatcccatcaaatatcacagtaataaaata

SEQ ID NO: 1432 - DNA, 549 bp, Ctenocephalides felis
gcaattttcagtgataaaagtgaattttaatttgtaaattaaaatgtcgctgtgcaaccgagctgctcaacgcgagcacgtattagccgtaactcgggattttatttctcagccccgattaacatacaaaactgtctctggtgtcaatggacctctggttattttggatgaagttaaattccccaaatttgcagaaattgtacaactcagactttctgatggaactttacgttcaggacaggttttggaagtcagcggctccaaagctgttgtacaagtttttgagggtacctcaggaattgacgctaagaacacactttgtgaatttactggtgacattttgaggactccagtatcagaggatatgttaggtcgtgtgttcaacggatcaggaaagccaattgacaaaggacccccaattttggctgaagatttcttggcatccaaggtcaacccatcaatccctggtctcgtatctatcctgaggaaatgatccaaactggatctctgtattgatgtgatgaactcattgtcgtggacagaaatccc

SEQ ID NO: 1433 - DNA, 549 bp, Ctenocephalides felis
gaaaaacaaaattatttgatacattttaatctagaatcatctgtgtggctaaatattatttgtgtttcaatttcgactatttgacgaaaatagataatagaaatggcacctaaagcatttggtgatgtgaaaatgcaaggacaagcatataaagataaaagtaaaccggctgatattcgtagcagcaatatatgtgctgcgaaagctgtttctgatgcagtacgtacaagtttgggacccaggggtatggataagatgatccaagcctcaaacggtgaagtgacaattaccaatgatggtgccacaattttgaaagaaatgaatgttactcatccagcagctaagatgttggttgaattgtctcgggcgcaagatattgaagctggcgatggcacaacatcagttgtagtagttgcaggtgctttgctggaggctgctgaaaagttacttcacagaggacttcatccaactgcatttctgatgcatttcaaagatgtgctccaaagctgtggaaattcttacacctgtcacaccaattgacttactgtc

SEQ ID NO: 1434 - DNA, 549 bp, Ctenocephalides felis
tgtgtattattcgcacacgtgaaataaatcatatcggtaaacttgtaatatctattttattaactaataagcgtagtttgtgtaataacaagtaatttctattagtagtcataagtaattgaagagaaaactattttccatataagaattgaaagcataaaatgattctctccgtgctgaaaaaatctcgcatcgtgcacttgtgttttgccatttcattcttcacatcaggcctgatcataaacattgcacaattcatattatacacatgtctcaagcctttcaacaagaggctttacagaaaacttggttattatttgtgctacacattttacagtcagatagtgtttttagctgactggtggtccaaatctaatctgaccttacacatatcaaagaaagattatgaacaatgtgggaaggaacatggtcttttaattatgaatcatacgtacgaaacagattggtattaggatggatgtttacggaaaaaattggtgtcttggaattgtaggatatgcaaaaagactattcaatacatccgcatta

SEQ ID NO: 1435 - DNA, 509 bp, Ctenocephalides felis
ttaatattagaagcaatgactgagagcaaacccatgttggtagagcattgcccattacttgtggaaggtgcacctattcctccagagcctgcaattggtcactggagacctgaggctacattttatcaagatggcgcaagaattgaagctggttttagaaaatattttcaccgagcagatcctgatcagaaggaagacagttacacaatgattgtatgtcacgccaatgtaattcgttattttgtgtgcagggctctgcaatttcctgctgaagcttggctgagactttcattaaatcatgcatctattacttggattagtatacagcccagtggtagagtaattctacgagtttttggggaatcaggtcatataccagcaatacaagttaccagtcagtaaaattttaataacataagataatttcaatttatttttattcgttttcttgaaatttatatattttgtatcaaattatgtttatatacctgcaaaaaaaaaaaaaaaaa

SEQ ID NO: 1436 - DNA, 549 bp, Ctenocephalides felis
  misc_feature (529)..(529): n = unknown
aaaaaatattattctaacattatggcgcagatacctgcacgaccgaaaattttgttaactcatccggatataccgaaggaagctattgacatcatgtctcccaattgcgaaataattatgtgcaccggacgtccgtctccatcacgacaaggaattttggaaaaaattgtgggagttcatggtttaatgtggtgtactaaagaacgtttggacaaagagatattagatgctgcaggacccaacattatggccatatctactatgtcggctgggctggacaatgtagatttacctgaaatccgcaaaagaaatattccaattggttatactgcaggagttctgaataatgctgttgctgatttaactgttgggcttatgatagctactgctagaagatttggagaagctaggaaacacatagagaatggaacatggggaagcggacctgcgtggtttttaggcagaaatgtatctgaaactcagctggtattgtcggctaggagaaattggcaaactgtgcaagaagatngaaagcttcaatatgactat

SEQ ID NO: 1437 - DNA, 251 bp, Ctenocephalides felis
gaatttggtagaggcatttgctttggtgattctggtggaccactagtttacaaaaatgaacttgttggcattacatcgatgcacttatactcctgcagaggtggcaggccagatatttttgtgaaagtgcgagatttccaatcctggattaattctgaaattgaaaaaaattaaatagattccaatcatgatttgttataatgaaaaatggtttaataaaggcagcataatttaaaaaaaaaaaaaaaaaa

SEQ ID NO: 1438 - DNA, 549 bp, Ctenocephalides felis
gttttattgaagaaactaaaaatgcatttttattttaaaactggccctggtgttcatgttatatgcatacagaagagaagtaatttggggaatacacaaaaatggaagatgatgccgatataagagaacaaatttttcacaacaatgtcagagagcagattatatttctattactctttcttctgctgtatttctcttcgtactggctgattggatggtttcgtcgcaaagagcgcgatgatttttacacttgcgcctacgacgacgatggcgaggcgacggtgtacagaatcagcctatggctctgcaccttcgcgcttgcagtcagcgtgggagcagcacttttactacctatgtctattgcaagtaacgaagtgctgatactgtatccgaacagctattatgtcaagtggctgaacagctcactgattcaaggattgtggaaccatgtattcttgtttcaaatttatcactattcgacttctgcatttgcatacctgttgcggagtcttccggattcgaaggacgcgaaaggagtttggcagactt

SEQ ID NO: 1439 - DNA, 549 bp, Ctenocephalides felis
gtcaggcgcactttacttaactgaaggtggagaacatcatgctgttgcttccatcaaatatcacgaaaagtacagcccaaacactttggataatgatgtggcagttttgaagttgaaaaatccattgactttcaatgctaaccagaaacctgtcgccttggcctcaaaggatacacctggagacctcaaatgcaaattctctggttggggattagacgcatatccaagtgatgttttaccaaatcatttacaaaaaatggacgttctgacctacaataatgctgattgccaaaagttccataatgctggacctaaatctaacacaatctacccaggaatgttatgcggattcaacaaacttaatgttggtgcttgcaggggtgattctggtggccattggtatacgaaagtgcaaatggtttggaacaagtcggtgtagtttcctgggtttatgaatattgtgctgtgggtgtgccagatgtctacgttcgcgtatattactattggactggattcacgaaaatccgcctgttttgcataaatatataa

SEQ ID NO: 1440 - DNA, 549 bp, Ctenocephalides felis
gaattggctagtgaatagtgtttgtgtttattaataaaaaatatatgatttatttactatttacttcaaaatattaaaatgtttcccagttcaaggtctatagtagtgttaagtaacaaggcatctcgggaatttttgaaacaaaaacttatacaaaatgttatcgtgaacaagtactctacaaatatagctgaggctgtatccgtcaaagatgctttaccatacaacaagatacctggaccttcaacattaccaattattggtgtagcccatcattttgcacctggaggtaaatacaaaggtctcgatttagcccaactaacagaaaagctctatgaagaatatggagatattgttgccatcagaggattgcctggtaaacccgatatggtttcctttataacttcgatcatatggaaaaagtatatcgtctgaaggccttgcctgatagaccagcttttgaatcacgagaatattcttgagagaaaaaagaccagaagtttcaaattgttatggctaatcactccaagggaagaatggcaaaaatcg

SEQ ID NO: 1441 - DNA, 549 bp, Ctenocephalides felis
attttgaccacatacacaatggttagcagtagtcctgaggagcggaaaatgtttcgtgttacacaaatgcattatgttatatttgatgaagcacacatgttgaaaaacatgaatacacagagatatgacaatttgattaaaataaaagcttcaagacgaatattgctaactgggacacctttgcagaataatttgttagagttaatgtcacttttatgttttgttatgccttctttatttgattgccaaagggaggatttgaaaagtttattccagaaaaattcaaaaactaactcaacagtgaagaaaggtgaagatgatgatgatttaccactttttgaacaaacacaaataacacaagctaaaaagattatgaagccgtttgttctgagaagactaaaaagagatgttcttaaagatttgcctaaaaaaactgattacactgacaagttccaatgcaccttctcaaaaacttcaatatgagcaattaattcaaaccttttttcagaaccggagaaatcatgcaaataaagaaagagtggaatgcaa

SEQ ID NO: 1442 - DNA, 549 bp, Ctenocephalides felis
  misc_feature (532)..(532): n = unknown
gtggtgcaggatttgtagatggtatgaatcttggagataacaccaaggcagcagttattcgtcttggtttaatggaaatgattcgttttgttgatgttttctatccaggaagtaaactttctactttctttgaatcttgcggtgtggctgatttagttactacatgttatggtggtagaaatcgtagagtttctgaagcatttgtgaaaacaggtaaatcattgaaacaattagaagacgaaatgttaaatggtcaaaaattgcaaggaccaataacagcagaagaagttaattttatgctgagaaatcgtggcatgcaagacaaatttcctttgttcactgctgttcataaaatttgcacaggagatatggatgttaaagaatttcttaattgtataaggagccacccggaacacatgtaagtgcctgctttataaaatataaatcagatttaaaatgcttctcagatggtaatattagtaatgtctttacatgaacataagtgagagttgctagttgtttgatattttgntcttcatatagtatttg

SEQ ID NO: 1443 - DNA, 546 bp, Ctenocephalides felis
attttgttttacattaaatttttcaaattcgatatgaaatttttactggcaatttgcgtgttgtgtgttttattaaatcaagtatctatgtcaaaaatggtcactgaaaagtgtaaatcgggaggaaataatccaagtacaaaagaggtgtcaataccatctgggaagcttactattgaagatttttgtattggaaatcatcaaagttgcaaaatattttgcaaaagtcaatgtggatttggaggtggtgcttgtggaaacggtggttcaacacgaccaaatcaaaaacactgttattgcgaataaccatattccggatgaaagaccaaattgatataaattactaaaattatgctagatagcaatcataaaattttgaagttttcaatgatcctaacatgttttgcctcaatttattttaacagcaaattgtggaactaccgtccgtacaaatgtcaagaaatctgatgttacaatagatattataatatgtacattgctatattatagaatatatactgattgcaagttgaaaaaaaaaaaaaa

SEQ ID NO: 1444 - DNA, 550 bp, Ctenocephalides felis
  misc_feature (5)..(5): n = unknown
  misc_feature (35)..(35): n = unknown
  misc_feature (275)..(275): n = unknown
  misc_feature (492)..(492): n = unknown
  misc_feature (524)..(524): n = unknown
gcatnatgctgaagtgtggatttatcgttgttttncttgtagcctccgccttgggcgagttttcgctcgacgaccgcatcgtaggcggcaccagtgttaatatcgagaacttcggatggcaagtgtccttgttcgatcgtatgggacacttctgcggtggttccatcattagcgacgaatgggtcttgacagcagcacattgcgtatttgacctattctcgccaaagcaatatgcagtgcgtgtcggaagtagtttacataacaaaggtggattnatccacaaaattgccaaagtatatatccatccagactacgatgaagtaagctacgacaatgacgtcgcagtcctgaaagttgaaaagagatttagactgaacggcatgagcgttcgcacagttaaattggttgacgaagatcacgagttgatgatggtgcccacttactgtcactggatggggcaaattaatgaataggcccacccataaattacangagtgaaagtgcctttgtcgaccatgatcatntccgcagtactctttccggaaacaat

SEQ ID NO: 1445 - DNA, 550 bp, Ctenocephalides felis
  misc_feature (454)..(454): n = unknown
  misc_feature (519)..(519): n = unknown
  misc_feature (529)..(529): n = unknown
  misc_feature (535)..(535): n = unknown
gttatcaacaggattttggagatcgtgcaaggtgtttccaacctagtctaacttcttcatcttcaatatgtgatgaacgattcacttggaaccctgataatgagcaaagaatgattttacaagaagctctgtccaaagcacacactcatttaggcactggagcatcaataggttccggttccatttctggtagctccattggttcttcttctacgtcgtcttcctcatctagttcttcctcaagttcttcttcatggtctggcagcggaatgggagttagttcaactcaaggacaaaaggaaattgttcaaatcagcccacaaaaagtagggcttaaattaagaattaatgaagttcataaactaaatgtttattatgcacaagctgagattatccagtagattatattatttgatggacttgctaagtctatggaagatgataagagagatgncagcattggagattactctcagaacctgagaaatatactcaaattccggtgggtttggactttgnggataagtgngatgcntatgtgcaacatgcc

SEQ ID NO: 1446 - DNA, 550 bp, Ctenocephalides felis
  misc_feature (365)..(365)
  misc_feature (409)..(409)
  misc_feature (427)..(427)
  misc_feature (441)..(441)
  misc_feature (447)..(447)
  misc_feature (457)..(457)
  misc_feature (543)..(543)
cttgtgccggtccgagagcaccctaaattcaactttgttggaaaactgttgggacctaagggtaattccatgaaaagattacaagaagatactatgtgtaagatggccgtcttaggtagaggctcaatgaaagacagacaaaaggaagaagaacttcgtaattccttagatcccaaatatgctcatttggctgatgatctacatgttgaaatatcggctttgggtcctccacagaagctcacgctcgagttgcttatgctttggctgaagtccgtaatatttggtccctgataataatgatacaattcgccaagaacaatgcgtgaaatgatgactgacccaatgcccgccagaagaaatgagangagcacccacattagacgaggtggttggctgtggtgcttctcgngaggaggatactaatcgngcagcttcgacatntggggnatgcttctgngttctaatgtgatccggcctcacccctcctcactcgtgtatcctgtaactaaatcttcattaataacaaagtgctgagaacttgtntaaaccc

SEQ ID NO: 1447 - DNA, 550 bp, Ctenocephalides felis
  misc_feature (33)..(33): n = unknown
  misc_feature (406)..(406): n = unknown
tcttattcatattaattataagaacatttattngtatttcttcaaattcttgattaggagcatgaattggattagaaataaatttattatcatttatccctatactaaatgataataaaaatttactatctaatgaatcttcattaaaatattttctagttcaagtttttgcttcaattttattattattttttatttctttgaattttttatttaaaaacttttttagaataatatattttaatgaaatttatttaattttattaaattcatccctatttttaaaaataggggctgccccatttcacttttgatttcctagaataatagaaggaataaattgaataaataattttattttaataacatgacaaaaaattaaccctataatttgttaagttattgnattaatataaattattttatttaattcattattaagaattataattggagcttaggtggattaaataatcctcttacaaaaattatacttattctcaatacactatggctgaataatattgtttaataaataatgaataatttt

SEQ ID NO: 1448 - DNA, 550 bp, Ctenocephalides felis
attttttaaagttttttttttttgaaattaatgtatttgcacagtgctcaaatatataatattgcttctaacatataaaaaatgagtttgaaaagacagcgcgatgataatcttaatgaagaacctgataagaagcttatcaaccgttcatgtccatacttagatactatcaatcgtcacgttttagactttgattttgaaaaattgtgctcagtctcgctaactagaattaatgtttatgcatgtttagtttgtggaaaatattttcaaggcagaggaaacaacactcatgcttacacccattctgtcagcgaatctcatcacgtctaccttaatctgacaacattgaaattttattgtttgccagacaattatgagataattgactcttccttagatgatataaaattgtattaaatccagtgtttcacctgaaagcatagctgcattagatgtaatgtgaagctatctagagctatgatggtctatgatatgcccggaatggtggtcttataatattaagcaatgctatgcatgtatctgcagcctt

SEQ ID NO: 1449 - DNA, 550 bp, Ctenocephalides felis
  misc_feature (541)..(541): n = unknown
  misc_feature (549)..(549): n = unknown
gtcagatcaagaatgtgccagtcttcccaattcaagatgcgatagtggcatttgtgtttgcaaattcaactttgtgcctcatccagaagacccaatatgtctagaacgtaaacaattgggtgaacactgcaacgtaggcgaacaatgtcacacaaaattcaacttcaatgctcattgtgtccgagaagtctgtgtgtgcagggaagatcaccacgaatcgaggaacagaacttgcatccaatctaaaggctataaccagaattgcgttgatgatatcgaatgtttcatcggagaagaatacagagacaggatcagatgtttccagaacaagtgtctttgcaaacctgaatttccagtcactgaggacggaaaatgcggatccggagctccaggcacacaagtgtggtcctcggttatgacattagcagttatggcatcagtagcaaaaatcatccgatgtaaaagtttaaaaatagaatgtccaagaaaataagaaaagacttaccaaaacttacttcgattacttaagaacatcttttcnagcatagng

SEQ ID NO: 1450 - DNA, 550 bp, Ctenocephalides felis
  misc_feature (4)..(4): n = unknown
  misc_feature (238)..(238): n = unknown
  misc_feature (290)..(290): n = unknown
  misc_feature (322)..(322): n = unknown
  misc_feature (359)..(359): n = unknown
  misc_feature (365)..(365): n = unknown
  misc_feature (369)..(369): n = unknown
  misc_feature (427)..(427): n = unknown
  misc_feature (444)..(444): n = unknown
  misc_feature (486)..(486): n = unknown
  misc_feature (488)..(488): n = unknown
  misc_feature (501)..(501): n = unknown
  misc_feature (525)..(525): n = unknown
  misc_feature (536)..(536): n = unknown
  misc_feature (549)..(549): n = unknown
gtgnaacttcatgtactataatattatatttgtattatatgtattataaattcatacatgcacacacacacatatgtatatatatatatatatatatatatatatatatagttcaaaaataatagcagctaattattcaaccaacatgataatataactgttacggattcttcacaattattcaatattgaataattcagaatatatatatatatatatatatatatatatatatatncatgtgtacgaacatgtatatgtgtatatatatatatatatatatatatttntatatatatatatgtatattcgcacatgtgtntgtacatgtatataggtatagatgttttttttgacanacatantgtntattagtatatatataaactatagtataaaaatataaatgagtggttcatttactttntgcacacctgactcatngaatcttgctttctaagacataaaatagaataattaaaattngngctcatgtatttnaacaatatactatctatgggggantgtatatgccngcttatctatttnt

SEQ ID NO: 1451 - DNA, 550 bp, Ctenocephalides felis
  misc_feature (516)..(516): n = unknown
gaaatatgcatcggtagaatattttaagtttttgtgaataataagttatcgagaatcttcagaaacaatgggagcaggcagcacgatatttagtgcaagacaagtgctgtggtgtatggtgttctgcggattcgccgttaactatatgataagaattaatttaaacatagcaatagtgtctatggtcaggcatcgatctttaattgtggttaacgaaacaattaacgaaaaattgcaattagttttggattctggggcggaaaatgtttcggaaagttcatccagcacccaagcgcctggaccaagcgagatctatcaggaggaagatggtttcatctgggacgaataccagcaagggttaattttaggggcatttttctggctccactggatcactcaagtaccaggaggaatttggctagaaaatatggtctaaactggtgtttggtttgcgaatttctaggtgcttattttgctcatcacccctatcgcgtatatgaatatcaacactatatnctcgagtaatcaggcattgttgcggtttcttggc

SEQ ID NO: 1452 - DNA, 550 bp, Ctenocephalides felis
  misc_feature (506)..(506): n = unknown
  misc_feature (512)..(512): n = unknown
  misc_feature (514)..(516): n = unknown
  misc_feature (520)..(520): n = unknown
  misc_feature (531)..(531): n = unknown
  misc_feature (546)..(546): n = unknown
  misc_feature (546)..(547): n = unknown
aattgttgctctgatcattgccggagttgagcttctgggagccatatttgccctgtgtcttgcaaattccatccgcaacgaagataggaggtacgcataagatctacttcaatactgtgtgtgaatatgtaattcgtttttgcaaaatatctattattatgcaaaaacaatcaacaattataccttcaaatttgaaaataataattcgatgtatgtatacaaaagccaaattttactaaaggcttctaatttaagaaatattatataattgagaacatttttatgaactatttaaacgttaggaattatttggagtgttgtcaaatgcttttaaatgtattaatatttacaatttgattattctcaaataacaaatatttttaatatttttgtaatgttattttatatattatcgaagtaaacacaaagacaaaaaatatatctacacatgtatgtatatatatatatatatatatatatatatatatatatatatatatatatanacacangnnnaccncacacacatanatttctatgtgtgtnnatg

SEQ ID NO: 1453 - DNA, 550 bp, Ctenocephalides felis
  misc_feature (33)..(34): n = unknown
  misc_feature (370)..(370): n = unknown
  misc_feature (504)..(504): n = unknown
  misc_feature (537)..(537): n = unknown
atttttcgagtgccactaagatggttaaaattnntaatgaaccgcgaaactgggaaagttatggaatagttgatgagcaacaacaaccttcaacctcctctgcaaacctcaattgcctaaatccaactactacttctacttcagaccgtcccgcagcgacggtttccaaaagaaaactgccttcatatcgagaaaaaatgccacgttctcgcacaagatcgcgatcccgcagtcgtcggcataacaatcatacaaatcatcggagggactattctgatgagcgccattctataagagtgaggtcttcttctagaaggaggagacatcatagaagtaggagcaggaatagagacagacatacacgtagganaaacgagagcggagatcatcatcgcagttacaggcgcagttcaggagaaaggagctatcgaagacaccacagacatggagatgattcagtcccgccgaacaagtacgcgtgaaaggcatcaggaaggtcgattnagatgataggaggacatctcatgtcaaacctgngatataattggag

SEQ ID NO: 1454 - DNA, 474 bp, Ctenocephalides felis
  misc_feature (4)..(4): n = unknown
  misc_feature (456)..(456): n = unknown
  misc_feature (467)..(467): n = unknown
gtcncattggtgccttccaaacccatgtgtgtcgaatccttccaggagttccctccattgggtcgtttcgctgtgcgtgacatgagacagaccgttgccgtcggtgtcatcaagtctgtgaacttcaaggatgcctccggtggtaaggtcaccaaggctgccgaaaaagccaccaagggaaagaagtagctagatctaccgatctgcttactgcagatgttcaacactgtaatgaaacactacttccatcgcaaagcgtttcgaagaaaaaaggcctcattcattcctttactatatgttttttgactcagctttatattttatatgactattttatagaataataattattttatgttctgctctatattaaaatgaatttatattaatgtatggatattatgtgctaagaaagaacttgaagagatttgcagctgatgtgtattatagtatggnataaatggaanccaaagt

SEQ ID NO: 1455 - DNA, 347 bp, Ctenocephalides felis
  misc_feature (5)..(5): n = unknown
  misc_feature (319)..(319): n = unknown
  misc_feature (323)..(323): n = unknown
gtttngtctcatgcaataattaattaaacttgtttgttagaggtgcaaaataaaattaaattaaaatgactgcctggagacaagctggtttaaactacattaacttttcaacaatcgctgcccgaatggtccgccaagctttgaaatctgatctaaaaaatgaggctttgaaacgggacgtatctagcattaaattcacaccctggaaggacggaaaagcgatcaaaagtgaaaccaagtaatcacaagatggaataatagacaattcactcaaattaataatgtgtacgtaaccgataacaagaataaatgttagttngatnaaaaaaaaaaaaaaaaaaaaaaaa

SEQ ID NO: 1456 - DNA, 356 bp, Ctenocephalides felis
agtttgctacacacagcacgtgtaaattttcataaaataaattaaaaatggataaacctgtagttcttgctcgcgttatgaaagtcttgggccgtacaggatcccaaggacaatgtacacaagttaaagttgaatttattggtgaacaaaaccgacaaatcatccgaaatgtcaaaggaccagtacgagagggtgatattttaacacttttggaatctgaacgtgaagctagaagactaagatagattaattctaaaatgtgagaggtgatatcctgaactataatatctgggttcaattatttgtatggaattataaatatacgacttatcactcccaaaaaaaaaaaaaaaaaa

SEQ ID NO: 1457 - DNA, 550 bp, Ctenocephalides felis
cttaaccaccgtcacccactcgccaaattacaccatggctgaaccagaaaaggctcctgaacaaccaaaggtgcccccacagaagcaaatcatcgcttcaaaggtgatgggaactgtgaaatggttcaatgtcaaaagcggatatggatttataaatagaactgacaccaaggaagatgtgtttgtacatcaatctgccatagttaaaaacaacccgaagaaggctgtccgcagtgtaggggatggagaaactgtggagtttgatgtggtaattggagagaagggaaatgaggcagctaatgtgaccggcccagaaggagagccagtcaagggaagcccatatgcggccgacaaacgccgcagctatcgccaatggagctccctcgtggaggacccaggggacccagaagaaattacgaaggaggcgaaggtaaagaagggtcgggttcgggaggcgagaacggtgatggcaaggcccgtcaaggaggcggccccgcgtggccgattccgcggtcgccacgatacacactattacggcgtggcggacggc

SEQ ID NO: 1458 - DNA, 550 bp, Ctenocephalides felis
  misc_feature (537)..(537): n = unknown
aaataatctctgaaaatgttgaagggcgttgtaggtcttgttactggaggtgcttctggtttgggaaaggccactgtagagcgaattgtgcaacaaggtggccgagttgttttatgtgatttacctaaatcaagtggatctcaagtagcaaaagatattggagataattgtttatatgcaccagttgatgtcacatctgaaaaagatgttgaggaagcaatagcattaactaaagaaaaatttggtcgtcttgatgttgctgtaaactgtgctggtatcggtgtagcatttaaaacatataatttcaataagcagttgcctcataaattagaggatttcacaaaagttttaatggttaatactgttggaaccttcaatgtaattcgattgctgtggattgatgggagtaaatgaacctaataaggatggtcaaccaggagtgattgtaacacacaagtgtgctgcttatgatggcagatgggacaagctcttattctgcgtccaagggctttgtggaatgcactgcttttgctaganattaccaggcaag

SEQ ID NO: 1459 - DNA, 546 bp, Ctenocephalides felis
  misc_feature (485)..(485): n = unknown
atttaattaaaatgggtaaatcctaggcaatattagaatatgatgtactcatgagatggcaaatcaaaattttacaagttcagatgcaaatgaagaaaatacaaatgaacctctaccagaatttatttgctcgtgttgttcacttaaacaaccttatgactataaaggatgtaatcctccatttgcaaaaaatatagctacaattgatgaatcctatataatgaaagatccttttagtcctgagaacaaaaatgaaattcttatattgggagccgattgtagtatttgtcaagaatctgtatgcgtatcaaccacttgcagtatatttttcatgaaaactctatgcaagaaatgtgcattgaaacagaaaaacatgtaccctgaacgatttaaacaaattattgacatgtttttaaataaatgcttaggtagttgaataaatgttgtatttaaatttatatttaaaattaactgttaaatattgngaaaaagaaaatatagaaaataattgataaaatgtgggtgatatgaaaaaaaaaaaaaaaa

SEQ ID NO: 1460 - DNA, 550 bp, Ctenocephalides felis
gattcagctttgcatagaattgtagatgcaactgatgcaattgttagcactgcatattcccataaaagaacatttattatggaagtaatgggacgaaactgcggatatttagctgttgttgcaggcttgtgtgttgaagctgattttatatttgcgcccgaagatcctccagatgccaactggccaagtgttttatgcgcactattaagtcaggaacgattagctggaagaaggcaaaatattatcatggtatcagaaggggcaattgatagaaatggagaacctataacagcagaaaaaattaaagaagtcattattgcaggtttaaatcaggatacaagaattacagtgcttgccatgtacagagaggtggaagtccttctgcttttgatcgattactgggatgtcgcatgggggcagaagcagtattagcccttatggaagctcatgatgagtctgaccttgtgttgtgaccttgcccgaaccaacagtcgtcttcaatgatggaatgtgttctcaccaaactgtacttacgcttggaaaataaaat

SEQ ID NO: 1461 - DNA, 550 bp, Ctenocephalides felis
  misc_feature (543)..(543): n = unknown
caaactcatcctttgtagaacgtgtcaagaagcgtggattcgaagtaatctacatgacagaaccaattgatgagtatgttatgcagcaaatgaaggattacatgggtaaaactttagtttctgtcacgaaggaaggtttggagttgcctgaagatgaagatgaaaagaagaagcgtgaagaggataagactaaattcgaaagcctttgcaaggttatgaagaatatcttggataacaaagtagagaaagtagttgtgagcaaccgattggtagattcaccctgttgtattgtaacatcacaatatggctggacagccaacatggaaagaatcatgaaggcccaagctcttcgcgattcctcgaccatgggttacatggctgcaagaaacacttagaaattaaccccgatcattctgtgattgatactttaagacaaaaggctgatgctgatccaaaggataaggccgtaaagatttagttatcttacttttcgagacagctttgctgcatctggtttactttagatgaaccccaagtccgctnaagaatt

SEQ ID NO: 1462 - DNA, 312 bp, Ctenocephalides felis
  misc_feature (5)..(5): n = unknown
attgnaacttcaagaattgtacgtaaaggctttgactaatgaggagtgcaaagctaaatcaccaattccaccaacgacccaagtctgcacacttttggaaaagaatcacggagtatgctcgggagattctggtggtccattgcttttggatggcgagcaagttggcattgcctcatttgttatcttcaaatgtgcaatgggataccctgactatttcacaagattgtctctatatgtagattggattgaacaacacatggattaaaaataataaaataataatttaatgtaaaaaaaaaaaaaaaaaaaaaa

SEQ ID NO: 1463 - DNA, 550 bp, Ctenocephalides felis
gtcaaacatcacaaaaatatatagctttatgtgtcacaaatgattacacttttatcgttatgatataatacaaaataaatacaatttcttacatgctattattataattcaatattaaaacatttgtactataatataacaatgaatttcttatatttattaatatgctctctttgtgcggtagtaaatgccggtggggatacattagttttattagacaatcttgcaattaaagaaactcattccatattttttaaaagcttacaagatagaggttatgttctaacattcaaattggctgatgaagccaatttagttttatctaagtatggagaatatttatacaagcatttaattctattttcacctgctgtggaagagtttggaggatcattaagtgtcgaggcaattcagaattcatagatgaaggtggcaatgttttggtagcaggaagtgaatcctggtgatgcaattcgtgaatagctctgaatgcggtttgaggagatgaggaaggacactgtatggacatcttaatatgatggtctgataa

SEQ ID NO: 1464 - DNA, 550 bp, Ctenocephalides felis
gtcgttttacatgcgccggacagacatacttcagcgcgctttaccaacaatgcgtgcaagcgcctttatccgagtgcttggcgacagctgcacctccaccaccgccaccaggaccaggaccatcgcaaccctttgcttgcgtgcggacaggattgtttttggattacactgataattcttgcaaatggtactacgagtgcacattaaacgctcaaggtgtattcgacgtggcccgatatgcttgtgcagctgagttatatttcaacagcgttctgcagcagtgcgtacctgcataccagtcagactgtttaggtgcaagtgtcacttcttccccatccataccatccttaccatccttaccatctttcccaaccttgccaacatcttccccaacagcaggatttccttttggccgaaaatctcttgatatgcaaacaaaaactggaactaaatgtacaaaaggagaagtttctaaagacgattaaattctacatgtcctagtgagtgtgtatatgaaatgctattgatatacatcaagcttataaggtat

SEQ ID NO: 1465 - DNA, 550 bp, Ctenocephalides felis
cgttaacgttggtttttcgtaacgtattatatatacaagtgtgtggattaattaaatatttacaatggcaactgaagtggtaaacaacgtgcaagtcaccgagaaggatgtcaaagaggagttgcccgagaaaaaaattgaagaagaagccccggccacagagaaatctgaaaaggccgatgaggctccggcttcgaagaccgagcctgcaccaccgaaggtgctcgtgcataaaacaaacttcgaaaaggataccgtgtatctttaccaattctccagaactcctcttttgccatcgatgtcgccgtactgcttgaaagtggagacctggttgcgtttggcaggaatcaaatacgagaatgtcgaccacaagatgaaattccgcagcaagaaaggacaattgcctttcgtcgaattgaatggtgaagaaattgctgcagtgccatcatcatgaaggagttgtcaaacctacggaaaggatctggatgctgtttgacaccagacacgcatgtctccatgctatggatccatgattgaaaaccacttgtat

SEQ ID NO: 1466 - DNA, 546 bp, Ctenocephalides felis
  misc_feature (28)..(28): n = unknown
  misc_feature (488)..(488): n = unknown
tttttttttttttttttatttgcattgngatagccggccgattgcattcagttctaaaatgccgatcaaaagtatcaaagctcgtcaaattttcgactctaggggcaatcctaccgtcgaagtcgatttagtgaccgaattaggattatttagagcagcggttccttcaggtgcttccacaggagcttatgaggctcttgaattacgtgataatgataagactcaatatatgggtaaaggagtatccaaagcattgcacaatattaatcaattgattgcccccgagttaattaaacaatcttttgaggttactcaacaggaagagatcgacaaatttatgttgaaactggatggtactgagaacaaatctaaatttggagccaatgctatattaggagtttcattagctgtgtgcaaagctggtgctgctaaaaagggtgttcctctgatcaacatattgcagatttggctggaaataaaaaaaatgngcttcctgtccactttcaatgtatcaatggcggagcatgctggaataactgtttcaga

SEQ ID NO: 1467 - DNA, 550 bp, Ctenocephalides felis
  misc_feature (488)..(488): n = unknown
gtaaaataattaatttattgttaattacattataaaataagctaatatgtaactcatcacaaaaatagcatttaataaattacaatggcccacctaaacaagagtttgaaaccaataaattactccaacacgtcattcagacacttttttcttgtattatttttcgtattggttttcgccctcagtattgctttattagttttatttccatatagtggaaaaagacatgaaatctataaggatataagtttggaagatgtcataaacgttccagaacaaatcattcatgatcaagctccctcagcaaatcctcgcaatccaaaatgcagccactgggattgttttaatgtgtatcgctgtggcaataaagggcacaatcaaatatctatttatatttatccaattaaaaaatatcttgatgctgatgatatacctgcactggtatcatgtgcaaagaatttattttattttaaaaactataaaagatncaaatttacacatcaaatctgatgaggctggatattggtccaagattgtacttaaatcaaac

SEQ ID NO: 1468 - DNA, 550 bp, Ctenocephalides felis
  misc_feature (9)..(9): n = unknown
  misc_feature (32)..(32): n = unknown
gaggaaagnggcaaagatgatgacgaggatanggaagcaactgaaaatgacacaacaaaagcagtgcctggaatttcttttgtcaaattgacatgcgtgcattgctctacaaaatgtgctacattgaaggagtatgttacccatttgaggagcaaaatacacaactcatatatgagccgtttagctgcacgtcacaaatctcgattggccaaaatgcgcgcacaacagaggaatgctcagcgagagatcgatgaaaagaatcaggaggactattatttaaagacaaagttttgtcctacttgcaaacttaattacaggcaactcagagctgaacatcaagcttctgaagcacataacgatattaagaagtatttgaagccttattgtaggacttgtcgtatgactttttcaagtcctatgcgttatgaagtacatatttgttcaatgcacacataaaacataaagctcatctggagtatgtaaaacacaaaaaacaagatatgaagaagttggtagtgatgaagctgaaagaatggattggatatttatg

SEQ ID NO: 1469 - DNA, 550 bp, Ctenocephalides felis
  misc_feature (545)..(545): n = unknown
cagaagctcaagccagagccgaagaagtcgaggaaatcaggaggaaatacagtgccagaatccaagaacaagaggagcacatcgagaccttgttggtcaagatcagcaatctggagaaacagaagagcagactgcaaagcgaagttgaggtcctcatcatcgatctggagaaagcaaacagcgctgcccgcgatttgcagaaacgttgcgagcaattggaacgtgtcaacatcgagatcaaatcacgtcttgaggagaccattcagttgtatgaaggagcccagagagatttgagaaccaagcaacaggagttgcagagggtcaaccacgaattggacaagaccagggaacagaaagatcagttggccagggaaaacaagaaattgggagacgaattgggagatgctcgcaaccagttggccgaatacaacagacgtttgcacgaattggaactcgaattgagaagactcgagaatgagccgaagagttgctgctgcatcaagaggccgaactgtcgcaaggccaagacacgttccacgttggcnacgat

SEQ ID NO: 1470 - DNA, 550 bp, Ctenocephalides felis
  misc_feature (5)..(5): n = unknown
  misc_feature (522)..(522): n = unknown
  misc_feature (527)..(527): n = unknown
  misc_feature (535)..(535): n = unknown
gcaantcgcaaacgagtttcagagcacagcggctgcgcatctgttaagctcaacggctatagtttttcagtattataatttgtattaagtcgaagtaaataacaaacatgagggaaattgtgcacattcaaaccggacagtgcggaaaccaaattggagctaagttctgggagatcatttctgatgaacatggaattgacccaactggagcttatcttggagatcatgaacttcaattagaacgtatcaatgtttattacaatgaggcttctggtggaaaatatgttccacgtgccattcttgtggatttggaacctggaaccatggactccgtgcgttctggaccatacggtcaaatttttaggccagacaattttgttttcggacaaagtggtgctggtaacaactgggctaagggacattatactgaaggtgctgaactagtcgactctgtttggatgttgtgcgtaaagaagctgaatcttgtgattgctgcaaggttccactacccattcttgggangtggnctgcttgnatgggacactattga

SEQ ID NO: 1471 - DNA, 550 bp, Ctenocephalides felis
ctgtgccagacatccaaaaaccagctcctgaatttgcaggtactgctgtagttaatggtgaatttaaagacattaaactcagccagtacaaaggaaagtacttggtactattcttctatccattggacttcactttcgtgtgtccaactgaaatcattgccttctctgaccgcattgatgaattccgcaagattggatgtgaagttgtagcagcctcttgtgattctcactacagccacttggcttggattaataccgcacgtaaagaaggtggcctgggacaaatgaatatcccacttcttgctgataaatccatgaaaattgctcgtgattatggagttttagacgaatcatctggagttccattcagaggcttgtttatcattgatcccaaacaaaatgttagacaggtcactgttaatgacttaccagtaggcagatctgtagatgaaaccttgagattggtcagccttccaattactgatgaacacggagaagtttgccactggctggagacctgtagtaaaactatgaaagcggaccaaacttc

SEQ ID NO: 1472 - DNA, 550 bp, Ctenocephalides felis
cagcaactcatttaatatttgtggatcctgatgcgaaaaatgaaacatggatattacacacacatattgcagcagtagaacgattaccgttgagtactacaggatgcccacttcaaattcgatgcaaaacattccaatcagtaatatttcttataagaaaagaaaacgatagccatgacgtttataatactttgttgcaattagcccaacctgtttctatcgatgatctgtattgcttccagtacaccataaataaaaatgatatgcataagagcgaaggttggaattattttaatttagaggatgaatttaaaagaatgaatgttccaaatgatgaatggatttacacagatttaaatgaaaattatgagctatgtgatacttatcctaattgttgtatgtgcctgctaacagcacaataaatatgttacaaggaagtgcaaaatttcgatccaaaggaagataccggtctcacatattacacaagaacaagcttcaatatgcagatcagcaacctttctggttcagtgcacgatgtctgagatgacaa

SEQ ID NO: 1473 - DNA, 550 bp, Ctenocephalides felis
aaaattttaattttaattattatgtgttcctttatcattgatgcgagaagtaaaagtttcgaaataaagttaagacggtggaaaagtcctcgacttcaattgattgaaatggatcgaaatatgcgtatagcggtttggaaagatattcaagaaaacgaaagctattattcggatccatctaaacctaaacctcctccaggtcctaaggacaatgatactatagcaatttataaatttttagatactgaattttatgctgaggttggaataggccatcctgtaaagtatttcaaacttgtggttgacactgcatgggcagaaacatgggtggcctcgaaacaatgtgggttaaagtgtgttggatgttggaatcttaataaatatgactctttggcatcatcaacatttcaagaaaacggtaaagaattttcttttggctcagcaaagaaccataacagggtcttctcaatagaaagttttatattgccacataaatgttaaaatcagactttggggaagtacatgtttgccttgcactctgtttcaaaca

SEQ ID NO: 1474 - DNA, 550 bp, Ctenocephalides felis
  misc_feature (3)..(3): n = unknown
ccntaccgccgatttgttcgaaagaagaaacatcgtccaagtcacactttgtttatatgctttgggcagacttacacaaaaacatcccgaatacacaggaccatcattaggccccaaaatggcagaaaagaatgaaaggacgtttactgaagagcaacttagagcccatgaaggagaattgaacttgcaaatgggatacaacaaaggtgcatcccaatctggccatggtggatttggtaacactaggcatatgtaatttgctgattttatacgtatttctgaaaatattcctcacaagtctgacgacgatacagattagtagattcgagcacactttgttcaatgttattctgatacagactcaaaattaacacaaactaacagaataaacacgacattcacaaacactcataactaatagatatagacacaacactaattttaacacaatccaatacataatgacatataaaaataaattaacatctctcgcattaatacgatacaaaaatttaattactaacaaacataatttacatattgaaatctt

SEQ ID NO: 1475 - DNA, 542 bp, Ctenocephalides felis
  misc_feature (539)..(539): n = unknown
agctcacagaattcagggctagctttaaccacttcgacaagaaccgcacaggacgtttggcgcctgatgagttcaagtcatgcctggtttccctcggctactcgataggcaaggatcgtcaaggcgatttggacttccaaaggattttggcagtagtcgatcccaatggaactggatacgtccacttcgatgcattcttagatttcatgacccgcgaaagtacagacaccgacactgccgagcaagtcatcgacagcttcagaatcttggcctccgacaagccatacattctgcccgatgagttacgcagagaattgccaccagaccaggccgaatactgcattcaacgtatgccaccttacaagggacccaatggtgtacccggtgctctcgattacatgtccttcagcacagccttgtacggtgaaagcgatttgtaaggtagaataaattttcataaacatttaagcaaacatttgacaagtacacataaaggtaaataatgaagttatgagagttacgatcaaaattagcattgngct

SEQ ID NO: 1476 - DNA, 542 bp, Ctenocephalides felis
  misc_feature (31)..(31): n = unknown
  misc_feature (33)..(33): n = unknown
  misc_feature (357)..(357): n = unknown
  misc_feature (387)..(387): n = unknown
  misc_feature (472)..(472): n = unknown
  misc_feature (476)..(476): n = unknown
  misc_feature (483)..(483): n = unknown
  misc_feature (500)..(500): n = unknown
  misc_feature (507)..(507): n = unknown
  misc_feature (512)..(512): n = unknown
gtttatcggtgtcttgggtcatgggaccagngnggcatcattaatcatgaatttaaatagtgtcgttactaatttctcaggtcttgtgacgagtccgatgttgaaaaagtattccgttcggaaagtggcggtggccggatcgctcctgaccgccacgggtctcatgatcagcagtcaggcacgctccctgtggctgattctgtttggatacagttttttgacaggtctaggtttgggttttataatgccttcggtgttcttggcagtgacctcttattttaaggtgctccgaggccgggcggtgggcctggcagcagccggtaccggcctgggacaaatggtaatgcctcatgccgntcgagcactgttggacgaatatagtttcanaggagccactcttattatggccgctatggctttacaaggggtggtaggcgcttctttattcaacccgtaaagaatacatgaaccngtcnatgacgnccgaccgagaaaaaatntttactngaccngatttacccctgacgctcagacctgaagaa

SEQ ID NO: 1477 - DNA, 542 bp, Ctenocephalides felis
ctccattctttcttaggtttcattcttttaagctgaccatcccaaaccaaatcaaccaaccctccttgtttggctatcactgctttcacacgatttgcaaagtctattgaactctctttttcttctctaaacattggaggtaagtaccaaacatcacatacaatcgcccatgaagacatcatcatgtataaataatgcatcattgaatactttgaactgttccaaaaggcatctccaaactttggatcatatttgatggctacaggataaattactcctccgacttcaaatgagccttttttaaactgcattaccgatgtattattgatacatgttccttctggaaatattaatattggtggattattaggatcagagatatgctgccgaagtctgtagtgacggcagttcgatctttgacttcagagcgttcaaaccaaatgtgaggtgatgccctagccagcgccctttgcagtatacctaggaaaccatcatgtctctgccaattagagaatagcaattatcacacatgagaacaagag

SEQ ID NO: 1478 - DNA, 542 bp, Ctenocephalides felis
  misc_feature (4)..(4): n = unknown
  misc_feature (32)..(32): n = unknown
  misc_feature (535)..(535): n = unknown
cacnaaggcaaaagtttgtacatttccaaagngatggattccaaaccctttgatcccgtggaaaatgggctcgataaagacttcaggcttactaaatttactgaattaggagggtgaggttgtaaggtccctcaagatgttttaaacaacttacttgagggactctgcgatatggagaaggccaagtccagtgatagtaaggaagttggaattggattggactgctccgttactcctctcgaagaaaactggtaccttttacaaacaacagattttttctatcctttaattgaagatccatatttaatgggtcgaattgcttgtgcaaatgtggtcagcgatttgtatgcaatgggtgttaccaaaattacaaacatgatgatgttattaggcattagtaataaaatgactccgaaggaacgagattgtgttattcctttaatgatgaaaggatttaaagatggtgctaaagaatcagatacaactatccaggtggacaaacagtcttgaacccttgtgtattattggtgggtcncacatca

SEQ ID NO: 1479 - DNA, 542 bp, Ctenocephalides felis
  misc_feature (2)..(2): n = unknown
gntatggaaaaagccgaaaagctgggccatcgcgttcaaaaatgtgtggttgtcgctcatctgaaacgtgtcactcctggaaccagcgaggagatcaatggagtcgagactcctatgacagatggccgcgaccattggtggcatgaggaaatggacgaagttgaaccagcatgttacccagaatggatggctgctgaggatccattgttcatgctttatacaagcggctccactggtaaaccgaaaggggttctacatactacaggtggttatctattgtatgctgccaccacatttaaaatggtttttgactacaagcccgatgacatctactggtgcactgctgatgtaggatggattactggacattcgtatgttgtctatggaccattagctaatggcgccacctccgttatgtttgaagggacgccattttatccggataacgatagatattgggcggtattgaaaaatacaaagtgacccagttttacacagcaccaaccgcataagacttgatgaagttcgggaagaccagtcaa

SEQ ID NO: 1480 - DNA, 542 bp, Ctenocephalides felis
  misc_feature (31)..(31): n = unknown
ttgagaaacttctcaaaattgataaaaaagntgctgtagtaatggccatggatatgttgttagcaggagttgatactacatcaaatagtacagcatttttgctgtatttcctggctacgaatcaaaaatgccaagataaactacgtgaagaaatcagaacaattctgccaaataaggattcacatgtaaataacgaatcatttcaccatttgccgtatttgagagcttgtatgaaagagtcgagtagaatattgccaataattggaggcactgttaggaaagtaccagtcgatattgttttatcaggatatcaaattccgaaggggaccgaggtggttctaagtcatcttactacatcaatgaaaagcagtcaattccctgaacctgaaaaattcatgccagaacgatggctgagcagccaggaatcagaaggatgtcctttagcaaaaaatgctcatccattttcgcacatgccttcggtttgggcctcgcactgcgtgggaaaagattgcagatttggaaatggaactttatatgaagta

SEQ ID NO: 1481 - DNA, 539 bp, Ctenocephalides felis
  misc_feature (14)..(14): n = unknown
  misc_feature (29)..(29): n = unknown
taaaaattttaatngcttattcttcaggngttcatataagaatagtattaggaggaatttttactataaatatattaggtattgtaggtaggtttattttaataatttctcatggattatgttcttctgggatattttgtctttctaatattatttatgaacgatcaggaagacgaagaattttaattaataagggtttaataagatttataccttcaataacattattttgatttttattatgtagatctaatatagcagctcctccttcattaaatttattaggtgaaattatattgattaattctataataagttgatcaataatattaatagtattaattataataatttcatttataagagcaaggtatagactatatttatttgcttatagtcaacatggaataagaagaataagactatattcttgtcttctggaagggttcgagaatatttattattatttttacattgattccattaaattattaattttaaaaagagattattataattatttataaaaaaaaaaaaaa

SEQ ID NO: 1482 - DNA, 540 bp, Ctenocephalides felis
  misc_feature (30)..(30): n = unknown
ctaatcgaagtgatcgtaaaatattaaatngacagctatttgttaaaacaattgtgcattatagaaaaacatttaagtgaaaattaattacgtttcagcagaaatacatcttctttgtaaatttggggttaataatctttcaaaatgcagatctttgtgaaaactctcacagggaaaaccattactttggaggtagaaccttcagataccattgaaaacgttaaagctaagattcaagataaagaaggaatcccaccagatcagcaacgtttgatttttgctggtaagcaattggaagacggcagaactttgtctgactacaatatccaaaaggaatcaacattgcatttagtattacgtcttcgtggaggtatgcaaatctttgtaaaaacattgactggaaaaactattacattagaggttgagccctctgatccattgagaatgtaaaagctaaaatccaagataaagaaggaattccccagatcagcagcgtttgtctttgctggcaaacaattagaagatggaagacttgtctga

SEQ ID NO: 1483 - DNA, 542 bp, Ctenocephalides felis
  misc_feature (3)..(3): n = unknown
  misc_feature (32)..(32): n = unknown
  misc_feature (38)..(38): n = unknown
gtnacattgatcggatctgttagcaaaggctnccaaantgccgaaatcgatgaatgttcgtgtgaccacgatggacgcggaactggagttcgcgatccagcagaccaccactggaaaacagcttttcgatcaggtggtcaagacgatcggtctgcgcgaagtctggttttttggactccaatatactgacagcaagggtgatttgacgtggattaagctttacaaaaaggtcatgaatcaagatgtcaaaaaggaaaatccacttcaattcaaattcagagcgaaattttatcctgaagatgtagctgaagaacttatacaggacattacatctcgtcttttttatcttcaggttaagaacgctatactgtctgatgaaatatattgccctcctgagacatcggttcttctagcatcttatgctgtcaagcccgacatggagattttcaaaaagaccaacactcttctggattttggcgaacgatagactgtaccacaaagggtaatggatcaacacaaaatgtctaaagaagaatgggaac

SEQ ID NO: 1484 - DNA, 542 bp, Ctenocephalides felis
cagacactgacaaaggcaaaaatgggtcgtcgaccggccagatgttatcgctattgcaaaaacaagccctaccccaaatctcggttctgtcgtggtgtgccagacgctaaaattcgtatcttcgatttgggtaagaagaaggcaggcgtagaagattttccactatgtgtgcatcttgtatctgatgaatatgaacaattgagttctgaggcactggaagcaggacgtatttgctgtaacaaatacctcgttaagaattgtggtaaagatcaattccacatcagaatgaggctgcatcctttccatgttatccgcatcaataaaatgttatcgtgtgctggagctgataggctccaaactggaatgcgtggtgcttttggaaaaccacaaggtactgttgccagagttcacatcggtcaaccaatcatgtctgtcgttccagtgacagatacaaggccgctgttgtagaggctctgcgtcgtgctaagttcaagttccctgcagacaaaagatctatgttccaagaaatggggattcactaa

SEQ ID NO: 1485 - DNA, 542 bp, Ctenocephalides felis
cacaagttctattcaaccagatagaatcttacttatggatacgtttttccaaattttgatcttccatggagagactatagctcaatggagagctttgcgatatcaagatatgcctgagtatgaaaatttcaaacaacttttgcaagctccagtagatgatgctcaggaaattttattgacacgttttccaatgcctcgttatattgataccgagcaaggtggatcacaggctcgatttttattatccaaagtcaatccctcgcagacacataacaatatgtatgcttatggaggagacggaggagcaccagtattgactgatgatgtgtctcttcaagtatttatggagcatctaaagaaattagcagtatcttcaaattcataaaattatataaagacagaaatagatatacaaatcttattttatctgtaatattgtgtgtcagtctttatatttgcaatatagataagtaataaattcaattgattatgaacctaaatacattgatatattaaaagaacatttacactaaaaaaaaaaa

SEQ ID NO: 1486 - DNA, 540 bp, Ctenocephalides felis
acagttaaagtgtattcaaatcaaataattccataaaactattctagaaaattatccaacacagttagataagatgaagtctttggtgctcttggccgttttggctgtaggttttgcaaacgctgaatattgttacgatgaaagtgttactgcttgttcatcgactgccaataaggaggatctcccccattgtaacgctctctactccggtttccacactgtggctgccgatttatcatcatacgttaaaagagaagtcctatactcctacgactacttgctgatgtccacacactttggaaactatgaaaagaatcgtgttggctttgaaaaactcttcaagggcctctccgacaagtcttgggaaaacgcaatcaatgtcatcaaatacatcaccaagcgtgggggcactgtcgacttccagactactcacaacgtcaacactacccgtgtagccgaaacatcagaattggaaagtttggctagggctttggagaatgagaaagtgctcgctaaggatgccaggctattcacaaacgt

SEQ ID NO: 1487 - DNA, 542 bp, Ctenocephalides felis
  misc_feature (538)..(538): n = unknown
caggagaaagcttcagttcgtgcacactaaatgtgttagtaccaggcgagaagaaaaagacaccagctttcagcactttcccagagtccgccagcgtgcaagagggcgagagtgcatcgttcttagttcgcacagaagacgaagttcttggacttcaatggataaaagatggtaaacctattgacgagaagagctctcgctatcgattcacaatggagggcaaaacgaccttccgattagagatagtatcctgcgccagcatagacgtgggccaataccaagccaaagccatcggtaagacaggagaaacattcgctgcgttctcagtgaatgtcgcagccgagcattgagccgaacaactaaattaataaccgatcctgcacacggcttaggccaaaaaacgagacgactcgcgttgaatcgcgagatatcgtgtaaacttaagtttattaaattattatgtttatatgaataaattattagtgtgatctaagcgtgttttcattataattcgccttgccacttcgcttatatatangccg

SEQ ID NO: 1488 - DNA, 542 bp, Ctenocephalides felis
atcagctacgcagagccacttccatttcactcctggacgagtcctttgttgtgtccggtgaacgtagagatcagggcgtggtagtggccttgaaggatggttttggctttcttcgttgtgcagaaagggagccaagactgtttttccactttaccgaggttttggatgtgacgagagagatctccatgggagacgaagtggaattcacagcagtacaagatcctaatagctcttttgctaattttagacacagcgctataaggattaagcatttacctccgggtactgtaaaattcgaaaccctaatcgaatcaaatctaacgggagtcgtgactagggaagcctctccaagaagccctagcaaatctcaaaacggtggtccaacacaaaacggcgggcctccagttccagaagggggcatgatttcttatcaaagcaacggtcaaaagaaatcagttcctttctttgcaaaagattgtgatcggcaacctagaatgggtgataaagtgatttcaacattagtcaggttaagcgtaataaag

SEQ ID NO: 1489 - DNA, 542 bp, Ctenocephalides felis
gttttggtcagcctgaaattgcaattggaacaatccctggagctggtggcacccaacgtttgaccagatctgttggcaaatctaaggctatggaaatatgtcttactggcaacatggtcacagctgaagaggccaaaaaaatgggcttggtaagcaaggtattccctgctgataaattggtcgacgaaactgtaaaattagcagacaaaatttcatcacattctccacttattgtctcattgtgcaaagaagctgttaacactgctttggaaacttctttgcaagaagggttacactttgagaagagagcattccatgctacatttgccactaaagacagattggaaggtatgactgctttcgtagagaaacgagcacctaactttaagaatgaataaaaagactactcgaattttataactctatatgtatatattttacattacctttgtaataggtaatatgaataacctctttatttacatgcatttgatatacttaatgatatttgatatattccttatatgatgattccattattg

SEQ ID NO: 1490 - DNA, 542 bp, Ctenocephalides felis
  misc_feature (33)..(33): n = unknown
cgaaaccataaaaaaatacggcaaactcaatgncctcatcaacaatgccggcatgttggaaacaggcaccatcgagacaaccagtctagaccagtacgacagaatcatgaacgttaacatgagatctgtgtaccatttgacaatgttagcagtgcctcatttgattgagacgaagggaaatattgtgaatgtctcgagtgttaatggtatacgttcttttcctggtgttctggcttataatatatccaaagcggctttggatcagtttacaagatgcgttgctttggaacttgctcttaagcaagttcgtgttaattctgttaatccgggggtcattattactgagatacataaacgggggggaatggatgatgaaacttataaaaaattcttagaacattgcaaaactactcacgccttaggacgtccaggacaagtaagtgaagtatccaatgccattgcgtttcttgcaagcgagcacagcagctttattactggtgcttcgttaccggtgatggaggcagacatgcctgtgcccacga

SEQ ID NO: 1491 - DNA, 542 bp, Ctenocephalides felis
  misc_feature (2)..(3): n = unknown
  misc_feature (32)..(32): n = unknown
  misc_feature (37)..(37): n = unknown
  misc_feature (467)..(467): n = unknown
  misc_feature (533)..(533): n = unknown
gnnaattattttattaagcgcattatttgcgngtgtnatttgctcctttaacgcggaagtacaaaatcgaatcgttggtggcaatgatgtaagtatttcaaaaattgggtggcaagtatctattcaaagtaataaccaacatttctgtggtggttcaatcattgctaaagattgggtactgacttcttctcaatgcgtcgtggacaaacaaagtccaccgaaggatttaactgttcgtgttggaactagcactcacaatgatggaggaaaagtgtatgatgttattgaaattataaaacatccgaaatataataaagcagtgccagatgattttgatgttgcacttttacggatcaaagagccaatatcatttactccatgcacagtaactcctgtaaaattaatacaatcgggaaaagaagtccgaagggaacaactttgagtgtaactggatggggcccacgaangaatgggggccaatttcgcaaagttcaagaagttaaagttaaagcttactcaagtcaagaatgcangaacagcat

SEQ ID NO: 1492 - DNA, 542 bp, Ctenocephalides felis
  misc_feature (31)..(31): n = unknown
aaaaaaacaagcttttttaacgaaatatttngcaaaaagagaaatatataaacaaacttaatgtctgaaacaatataaaataatattttcaacgctaacgcttaaataattccaaaacaaatcatgagtgactattttcttttatgttaacctctttacgcaaagaaaatgtttataaacttcaaacaacgttaaggtgataaatgtttacctaataataataataataagtttattttgattttgtgtataaaaacatgtcttggaggctgctgttgaagttttaatttgcaagtgttagatacaacttaataaaaaatgtctcaatgatgacaataacaaaaaattcttttacccaagtgcctcttgtatttataatatgatatacaaaatgcccccgtttagacgtaaaaaatctggaaagtcttttccagttaaagtttgcactttggacgctgagttagaatttaatttggagtggaaagcgacaggcaaagatttattcgaattagtttgccggacgattggttacgagagacctg

SEQ ID NO: 1493 - DNA, 542 bp, Ctenocephalides felis
  misc_feature (32)..(32): n = unknown
agttcatcttatgttgtaattatattatcagnttgttgtaaacacttcttattttatatcataaatatcgctgtatttgatttacacgatggctgcaagattgaattcattgtttaaaacagatttcacaaattacataaaacgtttaaacagcgttcaaatacgttgcttaaatttgcaagaatatcaaagtaaaactctacttcaaaaaagtggcgttgccgttcaagcctttagattattagataacaccgaaaacacaagtgtcttaaatgatttcaaagtccccgaatatgttatcaaggcccaagttttagcaggaggtagaggcaaaggccattttgataatggctttaaaggtggtgttcatataacaaaggaccctaaagaaatattgccaattgctaaaaatatgatgggtcacagacttattacaaaacaaacaaaagctgaaggtatacttgtcaaaaagttatggtgcacaaagcgttgacatttgcgggaaacatattatgtatcatcatggcagagctcatatggcc

SEQ ID NO: 1494 - DNA, 542 bp, Ctenocephalides felis
  misc_feature (3)..(3): n = unknown
  misc_feature (32)..(32): n = unknown
gtncgattgatttggtgctaattcgattcagntttgcatcagtcacagtcaaagtcggtaataaaatatggttactaaagcagtttgcgttttaaacggggaagttaagggaaccatttacttcgatcaaagcggtccagaagcacctgtcacactaacaggatgcgttagtggtttaagcaagggtgatcacggtttccacatccacgaattcggtgacagcacaaatggatgtatttcagctgggccacattttaatccccacggtaaagaccatggaggacctgattctgctatcagacatgtcggcgacttgggaaatcttgtagctgatgccgatggaaacgctaaagtgaaaataaccgacagtcaaatttccttacaaggtcctatgagcgttataggcagaacattggttgtacatgctgatcccgatgatcttggattaggtggtcatgaacttagcaagaccactggtaatgctggagctcgattggcttgtggtgtattggaatctgcaaaccttaatttaaaattgtatg

SEQ ID NO: 1495 - DNA, 542 bp, Ctenocephalides felis
attcggtgccagtgttccagaatcatggaaaagattagatggtagaatcgtaggaggacacgataccagcatcgataaacaccctcatcaagtatctttattgtactccagccacaattgtggtggttccttgattgccaaaaactgggttttgactgcagctcattgcattggagttaacaaatacaatgtccgtgtaggaagttccatcgtaaacagcggtggtatcttgcataaagttaaaaaccattacagacatccaaaatacaacgcagctgctattgactttgattacgcactcttagaactcgaaactcctgttcaactcacaaatgatgtgtccatcataaaattggtcgatgaaggagtagatcttaaacctggtaccttgttaactgttactggatggggatcaactggaaatggaccttcaaccaatgttttgcaagaagttcaagtaccacatgtcgaccaaaccacttgctccaaatcttacccaggaagtttgactgatcgatgttctgcgctggttatttgggaca

SEQ ID NO: 1496 - DNA, 542 bp, Ctenocephalides felis
  misc_feature (4)..(4): n = unknown
  misc_feature (290)..(290): n = unknown
  misc_feature (309)..(309): n = unknown
  misc_feature (371)..(371): n = unknown
  misc_feature (449)..(449): n = unknown
  misc_feature (456)..(456): n = unknown
  misc_feature (466)..(466): n = unknown
  misc_feature (474)..(474): n = unknown
  misc_feature (484)..(484): n = unknown
  misc_feature (496)..(498): n = unknown
  misc_feature (508)..(508): n = unknown
  misc_feature (512)..(512): n = unknown
  misc_feature (519)..(519): n = unknown
  misc_feature (530)..(530): n = unknown
  misc_feature (536)..(536): n = unknown
gttnccttgtctgcagctattcctcactccagcagagtcgttggaggactggaagctgcagagggttctgcaccttatcaagtatccttgcaagttggcaacttccacttctgtggtggttcaattctgaacgaatattgggttttgactgctgctcactgtttgggttatgacttcgacgtggtagttggaacaaacaaacttgatcaaccaggtgaaagatacctcgtagaacaaacttttgttcaccaattcgaccaggaatctttaagacacgatcttgctttggngaaagtgccagccctatcngaattcaatgattatgttcaaccaattccatttgggcgaaacttatgttggaggcggtgaantgctcgcttactggatgggggaagactggaactacttgaatggaccaatgaactccaagacttacactgtacataaancacaacnatgtgtaagnaacaattntccagttacncagcactttgannnttggtgcagngacnagccctncaccgtgactntggtgnccttgg

SEQ ID NO: 1497 - DNA, 542 bp, Ctenocephalides felis
gcccgagttagacgcgtttgtgaaatctagagttttttatttagtaaattcgtgcttcgtgttgaatatattcgtgatgtctggacgacgatcgggtactggaagaactggcccggcctataactcccgagcgagtactgggggtcctaataggcactacaacgatggcaatcgttataataatactaggagtaactcaaactacaaccagcaggaacagcaacaacagaacaatcagcagcaatatccacttgctcaagcacaagctcgcaatcaaaatacatacaacaaaccggttgaagtaaaagaagaaataaaaccggaagtaatgccatcacctcaaccacaacgtcaagctccaactccagttccagcgccagctcctgttgctacaactcccaccaaagtaaaggcagatgaaccccccgcgcaagagcccgttcagaaaccagaagcaatgcaagaagatggtggagatggtgataacgataaaaagcctggaagaaaaacaaattgataagtgaaaaactagcaacagcgaa

SEQ ID NO: 1498 - DNA, 542 bp, Ctenocephalides felis
  misc_feature (2)..(3): n = unknown
  misc_feature (510)..(510): n = unknown
  misc_feature (522)..(522): n = unknown
gnntttgcaagctttgaagagtgttatacgagaccagttgataaaatatgattttcagtattatcatgttgattttcaatgtgatattcctgtattagtatttagcgagggcaaaagtattctggatattaaaaaccaaattcctttggagatagatgaaaacatcagggacaactttgaaaatattttaccagctgttaaacagtttttaagtaatgaaactatggatctcattagatgttatttaacaatcatgaaatactcagaatttgaagttaatcaggaattgcatgagattatagaaaatgattttgtgaacttactgcaagaaccaggaatgactccagaagatctacactcatatttaacactggccagattgtatagtttatcccgaggtctaaggcatttaacaaaagactcctgcaagcagttaaagatcttgagactaaaagaagatctagaatcaaagccccaaacacactgcgaaatgtgaattgatataaagtntttcattcttgngatatattaacttgttttga

SEQ ID NO: 1499 - DNA, 542 bp, Ctenocephalides felis
  misc_feature (3)..(3): n = unknown
  misc_feature (476)..(476): n = unknown
atnacttcaagttttgtctgcaatatataaaaatttaagatggctaaagcaccagcagttggtatagatttgggtactacgtactcctgcgtgggtgttttccaacacggaaaagtagaaattattgcaaatgaccaaggaaacaggactactccttcatatgtcgcgtttaccgatacagagcgtctcatcggagacgccgccaagaatcaagtggccatgaaccccaataacacaatttttgatgccaaacgtcttattgggcgtaaattcgaggaccaaacagtccaagctgatatgaaacattggcccttcgaggttgtcagcgatggaggtaaaccaaaaattagagtatcgtacaaaggagaatccaaaaccttcttccctgaagaagtcagttccatggtgttgactaaaatgaaggaaaccgctgaagcttacttaggcaaaactgtgaccaatgctgtcgttactgncctgctacttcaatgactcacacgtcaagccaccaaggattcgggactatctcggtctaaatgtgt

SEQ ID NO: 1500 - DNA, 542 bp, Ctenocephalides felis
ccaatttatataaaagaatttaaaaaaatataaacatgaagccgctgatacttcaagggcacgaacgttccataacccaaatcaaatacaacagagaaggcgatttattattttcggcttctaaggatcacaaacctaatgtttggttctccttgaacggtgaaagactcggtacttttaatggccataatggtgtggtttggtgtatagatgtggattggcaaagtactagatttatgtcaggaagtggtgaccggtctctgaaattgtgggatttggaactaggcaaagaaattggttcaatacctgcccaagcatctgtgaggacttgcaatttctcattttcgggcaatcaagcagcatattcaaccgatagtagtaaatcctcatcttgtgaattatatattattgatgtgcgaaatgcagatagcagtatgtccaagctgatcctattttaaggataccaattccagaatctaaagttacagcaatgttatggggtctttagatgaaacagtattaacggacatgaaaatgggtca

SEQ ID NO: 1501 - DNA, 542 bp, Ctenocephalides felis
gagaaaagagtggaagaatttaaattaaagaaaatgtggaaaagtcccaatggaactatcagaaatattctcggtggcacagtcttcagagaagcaatcatctgcaagaacataccccgattggtaacaggatggaatgagcccatagtcatcggcagacacgctcatgctgatcaatacaaagccaccgacttcgtggtaccaggaaagggtaaattagaattgacatttacccccgaatcgggaagtccaatgagcttcaccgtccacacttaccaaggacctggagtcgccatgggaatgttcaacaccgatagttcaattgtagatttcgctaatgcctcattccaatatgccttaaaccgaaaattgcccttgtacctatctaccaaaaataccattctcaagaaatacgatggtagatttaaggatatattccaggaaatttatgacaagcaatacaagaaagaatatgaagctgtggaatctggtacgaacatcgactgatcgatgacatggtcgctacgcaatgaaatcatctg

SEQ ID NO: 1502 - DNA, 537 bp, Ctenocephalides felis
  misc_feature (528)..(528): n = unknown
tttttttttttttaaatattagtgtaacttttaataaaattatttactcaatatcttaaaattgtttgtgatggcacatgttttataactgttttgaaaatttcgagtcacttcttaaagttaaaatttaattaaagtcagtgtagtggtaataaataaattttggcatcaaattaagtattggatatcatggcgaataataatgtgataaattttggggcaggacccgccaaactcccagaagaggtgatgcttgaagtgcaagaacaattggtgcattatggtgaaacaaaaatcagtgtaatggaaatgagccatcgatcaaaagactacatgaaaatcaacgatgatacacaaaatgcagttaaagaattattcaaataccggacaattcaaaatactatttctgcaaggaggtggcacaggatgtttgcagccataccactgaatattttgaagactggagttgcagattatgttgttacaggttcttggtctgcaaaagctgcaaagaagcaccaaattggnaagtaacat

SEQ ID NO: 1503 - DNA, 542 bp, Ctenocephalides felis
  misc_feature (2)..(2): n = unknown
  misc_feature (33)..(33): n = unknown
  misc_feature (39)..(39): n = unknown
cnttaatatactatgaatggtggagaagattgngctcangatgtgaaagagcaagaacaagttaacggtggcggtgaagaaggagccggcgatgcgtctcgtgaaaatggaagcgccgaagctcctggccgtgacgacgataggaaactctttgttggtggacttagttgggaaacaactgataaggaattgcgtgaacactttggtgcatatggagatatcgatagcattaatgttaaaactgaccccagtactggtcgatcacgaggatttgcattcatcgtgtattcatctcctgaatccattgataaagttgttgctgtatctgaacatataattaacaacaagaaagtagatccaaagaaagccaaggcccgccatggaaaaatttttgttggaggtttgacgactgaagtcagcgatgatgatattaaaaactatttcaatcagtttgggacgatcatagaagttgagatgccatttgacaagacgaagaatcaacggaaaggtttctgtttatacttttgaatctgagcaagttg

SEQ ID NO: 1504 - DNA, 542 bp, Ctenocephalides felis
  misc_feature (539)..(539): n = unknown
cgcagtcaccctaacccttctagtcatatgcgttttctacacctctttcggagggatgagggccgtcgtctggacggacacgcttcagtccatcgtcacctgcggcgctatgttcgccgtcgtctggataggagtagcagacgtcggaggaatagcagaagtcttcaggagggctgacgaaggaggcaggatcatatttttcaatatgaatccaagtatttaccaacgaacatcattctggagtgtcagtcttggactgacaaccatgtggttgtctaatcttggtgtcagtcaaagttgtatacaaaggttcctgtctgtgccaactttaaaggacgctagatggtccattatctactttacgataggtttagtcttaacaaaatcaatatcctgcttcaccggactattgatgtatgctcattacaaagactgtgatcccttaagtactggtgatgtcaaaaaagcagatcagatgttgcctattatgtccacgacgtggcaggtatataccaggactataagtttattcgtactgngtc

SEQ ID NO: 1505 - DNA, 542 bp, Ctenocephalides felis
  misc_feature (487)..(487): n = unknown
ctaataaagagatggctggaaaacgacgagttataatcgacgtagatgccggttcggacgatgccatagctttgctcatgctgatagcagcgcacaaacggggtgatgtggaactaatgggtatcacttgtgtggcgggtaatacaaatgtggataatgttgcgataaatgttctacgtgttctgggtgctgtaaaggctttagatatccccatttacaaaggtgcatcggaaggtctgattcctctagatattccaaattccacagaatctgagttccatggtggtgatggatttggtgatttagagcactatggaaatgatcctgatttgagtttaatcaaaccagagcatgcagtaaattacctaatttctgcagctaaacagtatgaaaatgaaattacttttatatttgtgggcctctgacaaatgcagcacttgcaattaaaatgtatccaggttttctagacaaaactaaggatgtgtantaatgggtggcaactataaagcgtgggtaataaaacaagaccgcagaattaattt

SEQ ID NO: 1506 - DNA, 542 bp, Ctenocephalides felis
aaaatactagttttattgccattaatatttgaaaaatatcattgagaaaatgtcaatattattatgcgcgctattttttgcttcgacgcttagcaatgaaactttgtcgaaacaccatcaagttaagaatcgtcgattttacatagattatgataaaaatacattcatgatggatgacaaaccatttcgatacatagcaggttcattacattattttcgggtacatccgcaacaatggaaagaccgtttggaaaagctaaaagcagcaggtttaaatgccgttgatacatatgttgagtggtcacttcacaattttgatgaaggaaaatattggtggggcagcaacgccgatttggagcaatttattaaaactgcacaagaagtaggattgtatgtaattttgagaccagggccatacatttgcgctgaacgtgattttggaggccaaccttattggctcttatccacccagaaaaagatattaaaccaaggacactgtttcgtatatggaagcagcacgagatggatacaagaatattaaa

SEQ ID NO: 1507 - DNA, 550 bp, Ctenocephalides felis
  misc_feature (538)..(538): n = unknown
cttgaccgccaccgagtctgaagtggctgcactcaacaggaaggtgcaacaaattgaagaagatttggaaaaatctgaagaacgtgccggaagcgctaccaccaaattgcttgaagccacacaagctgccgatgaaaacaaccgtatgtgcaaagtattggagaacccgctcacaacaagatgaagagcgaatggaccaattgaccaaccaattgaaggaagcacgtctcttggctgaagatgctgatggtaaatctgatgaagtatcacgcaagttggccttcgttgaagatgaacttgaagtagctgaagaccgtgttaagggaggtgacagcaagatcatggagttggaagaagaattgaaggttgtaggaaactccttgaaatctttagaagtatccgaagaaaaggccaaccaaagagtagaagaattcaaacgccaattgaagactttgccgtcaaacacaaggaaccgaactcgtgccgagttcgccgaaaagaccgtcaagaactgaaaaggagtcgcaggctgaagacnattggcataaca

SEQ ID NO: 1508 - DNA, 548 bp, Ctenocephalides felis
aacatcccataataaaagcattgtacagcctagtggtaatgatcatattcgagggggtaatgttgctccacctagaatgcaagatgttgtccgtccaaaaagatattcttgtcaaagacctggtggtattgtaccagaaacaaacatgcaaggccaaccgcagcaacaacaacctgtatatcaacagaactactatgcaactgaatatactccgcctgtagcaaatgaacaaaataattcacatcaaggacaacatataccacaagcactaaatgggatgccccaaccagggggtcaggttgtacctcctaatatttctgtgccacccccgcaaacaatgccttatgtaccagaaccagttcctacacaggtcataaccactagtaatcaagtgatgccgcaacaagttcttgccctcaatatcctcaagttctatgcagtttaattcgggaggaccctacatggctcaaataatacttttatccacaatctttaggtatctgtcctctctaacatgcaccccacacaatatctcccaatccctcata

SEQ ID NO: 1509 - DNA, 405 bp, Ctenocephalides felis
gattattcaaaagaaagacaatttagaggattgcaaagtaaaattgaaggcgagcataaattttcagttattagacaaggagaagtgaaacagatatcggttggtgatattgtcgtcggcgatatttgtcaaatcaaatatggagatcttctaccagcggacggtttattgatccagagtaatgatctgaaggtggacgaatcctccctgacgggagagtccgaccatgtgaagaaaggcgagtccttcgacccgatggtcctgtcggggacgcacgtcatggagggcagcggcaaaatgctggtgacggccgtcggcgtcaactcgcaggccggcatcatcttcacactgctgggtgctgcagtcgaccaacaggaacaagagatcaaaaaaaaaaaaaaaaaa

SEQ ID NO: 1510 - DNA, 482 bp, Ctenocephalides felis
caagctgtcaaagtctggcaaatatattttaatttaataatttttgtctgttttaaataaaaaatgtttcggagagcgatttctagtgctactaaattgcacaaacaaactttaggtaatcaaattgtgcaagtcaggaaccatggtggaactgccaattaccgctgtgcttcacgtccttcaaaagaaattaaacttctcggtgaacttactggggctttaatgtggtactggtgcttgtaccatatttggactgaaccggatcatattttaggagagtttccttatcctgatcctagtaaatggacggatgaagagcttggtatcccagccgagtaatgatggatagttaattgatagaaataattaaatattgaaatttaatgaagtatctggattgtatatggtactgcaatttgtatatagaaagtgaataagatgtgttaaacggtagtgaaatggaaaaaaaaaaaaaaaaaaaa

SEQ ID NO: 1511 - DNA, 550 bp, Ctenocephalides felis
gctactcattttacgtaacgttttagaagtgtgtgggtgtggtgctaattttagcaccgtagcgatcgtttttattaagttttttttattttgagtaatagttttaatatattttaccaaaatgttgcatcttaagtcaatcaccaaaagtgcactgaaacataacccctccgaagtgtccacattggtcaaagctctgccaacggccatccaaacgcgctcttactccgagcaccaaattcccgataggctgaaggatgtcccaacacatcctaatccaagatttttcgacatggtggagtacttcttccaccgtgcctgccagatcgtcgaatctaaattggtcgaggacatgaaaggaagcaaaatgacagttgaagataaaactaagaaagtcaaaggtattcttatgttaatgcagccatgcgatcacattttggaaattgctttcccattgcgcagagattcaggaaactacgaaatgattcagggttaccgtgctcaacacagcacacatcgacaccaccaaaggaggttccgtttcaatggt

SEQ ID NO: 1512 - DNA, 550 bp, Ctenocephalides felis
  misc_feature (523)..(523): n = unknown
gtcacttgtagcggtttgttcgattataatatttttacgaaacaatgaaagtaatattgagaaacaaataatacaaatgtagttgatttcgtacattttatagcaatcttcacgatggccgccggtccgatagcagaaagaaatcaagatgccactatttatgttggtggtttggacgataaagtctcagaaagtcttatgtgggagctatttgttcaatctgggcctgttgtgaatgtccatatgccaaaagatcgagtaactcaaatgcatcaaggatatggatttgttgaatttctgggagaagaagatgcagactatgcaatcaaaattatgaacatgataaaactttatggaaaaccaattagggtcaataaagcttcagcacatcagaaaaatcttgatgtcggtgccaatgtgtttataggaaatctagacacagaagttgatgaaaaattattgatgacacatttctgttttggagtaattcttcaaacccgaagatatgagggatccaacctgnaatcaaagggtttgcatcataaatttg

SEQ ID NO: 1513 - DNA, 550 bp, Ctenocephalides felis
ggcagttaacctaccgtgtggaataaattcgagggttttctgctgaagttgttattaagttaatgatatcaagtctatcacatatatttacgtactatttttaagtgtgacagaattataagtgtgctttgtttataatttaagaagtgaaaatagtaattaaagcagtaaaatatggtaaatttaggtgacattttcccaaattactgtttaaaaacatctattggtgatattaagtttcatgattacctacaagattcatggggaatattattttctcacccggccgattttaccccggtttgcaccaccgaattagccagggttgtaaaactgatgccagaatttgagaaacgcaatgtcaaggtaattgccttgtcttgcgatacagtagcttctcatctggaatggtccaaagatattttgagctatgcaggtgaaatgaccaagacattcccatacccaatcatcgacgatagttcccgcgaattagcagtaaacttcgtatgattgcccggcgagaaggataaggatggatgcgtgccgccag

SEQ ID NO: 1514 - DNA, 550 bp, Ctenocephalides felis
tcaaagtggacgttagttaaatgataattgatttgtagtaattgaaagttttgtattttattttgttaaaatattttgttaatttcgttgataataaattaataaaaagtgcccgaaaatgtctgcatctcctctggaacgattgtcaaaaacagagaccatcgagttgagggacaaacatattggaaaatcctgccaattgttcttccgagaggatcctctgaagattgtaagaggcgagggtcagtacatgtacgacgagactggcacaaagtacttggactgcatcaataatgtagcacatgttggtcactgccacccaaaagcagtagcagccggagcccgcaaatgtccctgctctacactaacaaccgtttcctccatgacgagctggtgatcctggcccgcaggatttcctctcttttgcagaacccctgagtgtctgctacctcgtcaattcaggatcggaggctaacgatttggccttgaggtggcaaggattcacacaggaaacaagatgttatcacgctgcacagtgagtagtagatgg

SEQ ID NO: 1515 - DNA, 550 bp, Ctenocephalides felis
agagaactagcctgtgaaaagatcgtcggctttggggcagccagcacgtaggtttctgactcatttcagtttggtcatttctgattggcatacatcattgttctgcaactgtttttataagtttttacacatcttccaaatcctgtgcagttttttttatttgggaccacagtatataacaagttattgtatgagtcagaaaaccgaaaaaccagtactatcaggtcagcgcatcaagaccagaaaaagagatgaaaaagagaagtatgatccaagtggattccgtgacgcagttatctcaggtctcgaacgtgctggcaacgatctcgacgcagttaacaaattccttgacacagcaggctctaagcttgattatcgcagatacggagaagcactgttcgatattcttatagctggtggattgtagtgccgggtggttcaatagcacaagatggagaaaagccccaaaccagtagttgtgtctcacagcttctgaggatatggagtcaatgcgaaaccaggagcaggtttcgtgaattatgctcgctta

SEQ ID NO: 1516 - DNA, 550 bp, Ctenocephalides felis
  misc_feature (15)..(15): n = unknown
  misc_feature (45)..(45): n = unknown
  misc_feature (47)..(47): n = unknown
  misc_feature (61)..(61): n = unknown
  misc_feature (75)..(75): n = unknown
  misc_feature (78)..(78): n = unknown
  misc_feature (133)..(133): n = unknown
  misc_feature (203)..(203): n = unknown
  misc_feature (233)..(233): n = unknown
  misc_feature (278)..(278): n = unknown
  misc_feature (334)..(334): n = unknown
  misc_feature (362)..(362): n = unknown
  misc_feature (418)..(418): n = unknown
  misc_feature (427)..(427): n = unknown
  misc_feature (460)..(460): n = unknown
  misc_feature (469)..(469): n = unknown
  misc_feature (485)..(485): n = unknown
  misc_feature (513)..(513): n = unknown
  misc_feature (521)..(521): n = unknown
  misc_feature (529)..(529): n = unknown
agaaagatattccantgaaaagtgctattctatggtttcaattantnttggatcacaaganatacctactcgttnatntaaaatgaaaattctaattttattcttaatcattctttctatgttttaccttgcntcctgtgatgagcgcatggtgaatggaaacgaagtatacattctaacattttattggcaattgtcctttncaagtaattttcaacatttttgcggtgcancaatgatcagtaagcgatgggcaataacaaccgctttttgtgctnaaaaaacgtctatccatgcagctagagtacgtgctggaaccagcaaatataatagnggtggtactcattacggtgtggaatggntcgtccctcatcctcgttatgatagccgcgatcaaaattcaatgtaggtttaattntgataacanaggatttcaatgaaactagaagaaccgcctgcnagctcgtanaggcaaatgtcgcttnctgtagctcctttgccattctggatggngatctgancgatccangagcacctatgtaagaaatct

SEQ ID NO: 1517 - DNA, 550 bp, Ctenocephalides felis
  misc_feature (547)..(547): n = unknown
ttaatgtcgacggaacgcctttaacagtaaataaagaagtatttgcatcattggatgagcccgcaccaggagtagtacctactcctgaacctacacctgtaccgaaacccgagcaaaaatgtaaaaaagtaaaatttagttgcgtgaattcgtgcagttcacccgaaatgcagtattgtccggaaataggagcagatccggttaaggaatcctgtagcccagatcaagtgtgcgctgatcaaagtggatatctacagtgcaccactaaagaaagtacagtctgcaaagtacaaggtttcaaatgtccgtcaccatcgagattttatccaaatataaatgattgtcaaagctattattattgtgacgaaaatagtataggaacccaatattattgcccgcaaattttgcatatgatccgttacgtcataattgcggcctatggctctgggcacaaaatgctatacagttacatgtctgccagcctaaggtgcttccgtacattggtgataaatattgacgtcgatgtatggccggaagaggaccgtangca

SEQ ID NO: 1518 - DNA, 550 bp, Ctenocephalides felis
cgagtttatattttatttttaataatttaatttatattattgaatgggagattattagaattaattctataataattatttttagaatattatttgattgaatatctttaatatttataagatttgtattaataatttcttcaatagtagttaagtatagagaaagatatataatagaagattttaataaaaatcgatttttattattagtattaatatttgtattttctataataataataattattagtccaaatttaattagaattttattaggttgagatggattaggtttagtttcttattgtttagttatttattatcaaaatattaaatcttataatgctggtatattaactgttttaataaatcgaattggggatgtgctttattaattagaatttcttggataataaattatggtagttgaaattatttattttatataaaatatataataaataatttgaaataatttaattatatttttgatttaatttctgcaataactaaaagagcacaaatccttttcttcttggtaccagctgca

SEQ ID NO: 1519 - DNA, 550 bp, Ctenocephalides felis
ggtaaataaataaaaaaaatacttttatgataacagaaaaaaaactacaggtttaatgaaatcagttaaaatcagagtgaattttaacatataaatttaaatattataaaaatcatcttagcttttacaaacttaaattgcaatgagtaattgttgtcgaatattatggattgcgatagtgatcggtttaggtgtgttgtattacgaaataactaaagaatttccaaagccaaatatacctctggatacatggtggggaactggaaaatcacaaaaaattgatacatcaatgaggccgtttaaaattgccataaacgatgaggtccttaataccttgaaagtgaaactaagtgatgtgtcctttactccacctcttgagggcatcgatttccaatatggtttcaatacaaataccctgaaaaaacttgtagacttttggcgaactcaatacaattggcgcgaacgtgaagcattattgaataaattcccacttcaaaacaaatattcaaggcctggtattcactatgtccataaaccacagtctccaaaa

SEQ ID NO: 1520 - DNA, 550 bp, Ctenocephalides felis
ctggtcttcccgccttatcgtacatcataattcgaactcaaaatcccaatatcgtacaaagactagtcctcggcgctgctttgctatatttatcatttgttcacatgcacagacagtattatgattacggatcatacaccttagacattacaggtccccttatggtaattactcagaaggtgaccagtcttgcgttcagcattcacgacggcctggcacgcgacgagaaagatttaacgaaggaccagaattatcatgctgttcgcagaatacctactgctctagaattcttcagttacaccttccatttccagggtcttatggctggaccagttgttttttatagagattatattgattttattgatggaaaccatgttctgaaatttacaccgaaatcaacggcaagtctagataataactcaaacagcagaaaagttgtgcttgaaccttctctataatcattgcttcaaaaaagtgatagtcagcacaatatgcgcctgtatttattagttcttccattgttccaattaaagcttgaaagaagatg

SEQ ID NO: 1521 - DNA, 550 bp, Ctenocephalides felis
  misc_feature (473)..(473): n = unknown
  misc_feature (508)..(508): n = unknown
  misc_feature (519)..(519): n = unknown
  misc_feature (546)..(546): n = unknown
ggaaaacataaattcctcggatacaaaaccaactcattggatgaataaagatggaaaacctttgactattgaagtaggaaataaagatggatgggttattataaataaacagaattcaggttactatcgcgtgaactacgataaggacaactggaaaaagcttgcagatgtcttgaaaagtcctgaatttgaaaaaatccacgtactcaacagagcccaaattttagacgattctctaaacttggccaaaactggaaaacttgattatgaattggccttagacattttagattacttgcaccacgaattggattacgtggcttggaaagcagctgaagaagatctcaattttctcgataatatgctgagtggaacaaaagtctaccccaaatttaagaaatttgtattgcatttagtgaacaaagtttataataaaatgggatttgagcaacaagatgctatgggcacattgngtttcactcgcataaatgctctaacatgggcttgnaaatggccttncagatgcttgcagtctcatgtcgcttntgct

SEQ ID NO: 1522 - DNA, 172 bp, Ctenocephalides felis
caggatttcatggtcttcatgttttaattggaacttcttttcttattatttgtttactaccacttagattatttcattttaatcctaaacatcattttggatttgaagcagcagcttgatattgacattttgttgatgtagtatgattatttttatatatttctatttactg

SEQ ID NO: 1523 - DNA, 673 bp, Ctenocephalides felis
  misc_feature (531)..(531): n = unknown
  misc_feature (640)..(640): n = unknown
gttaattcccattaacacgcggcgtttttcgtttagcaattcaataaattacacacttcacaatggctgatatggaagatactcatttcgaaactggagactctggagcttcagcgacctatcccatgcaatgttctgcacttcgaaaaaatggttttgtaatgttaaaatcccgccccgtgtaaaattgtagaaatgtccacttccaaaactggtaaacatggtcatgctaaagttcacatggtcggaattgatattttcaacggcaagaaatatgaagatatatgcccatctactcacaacatggatgtcccacatgtaaaacgtgaagattatcagctcactgacattgatgacggttacttaacattgatggctgacaatggagaccttcgagaagatcttaaaattccagatggcgaattgggacagcaacttcgtaatgatttcgaatctggaaaggagcttttgtgcctgactaaaatcttgtggagaagaatgtgtcattgcgatcaaaaccacacagccttntaatatgattttcacacattcaaataaaatctatgagaccattcaactgttaacagttgcaagtggcgtgtatctagtgtgttgctataaatctgcctcagcttgttanattatgcaaaatcaggttagtctttgatatttg

SEQ ID NO: 1524 - DNA, 681 bp, Ctenocephalides felis
  misc_feature (612)..(612): n = unknown
  misc_feature (652)..(652): n = unknown
  misc_feature (671)..(671): n = unknown
  misc_feature (678)..(679): n = unknown
gaaactgttactcttttggttgcattaaaagttaggtatcgtgaaagaataactatactgcgaggaaatcatgagtcacgtcaaattacacaagtttatggtttttatgatgaatgtttacgaaaatatggaaatgcaaatgtttggaaattcttcacagacctatttgattatttaccacttaccgctttagttgatggacaaatattctgtttgcatggtggtttgagcccttcaattgatactttagatcatattagggctttagaccgtttgcaggaagttccacatgaaggtcctatgtgtgatcttttatggtcagatcctgatgaccggggtggttggggaatctcgccacgtggtgctggatacacttttggccaagatatttcagaaacatttaaccattcaaatggcttgacattagtatcaagagcacatcagctagttatggaaggctataattggtgtcatgatcgaatgttgtgacgatttctcggctcctaattattgctatcgtgtggcaccagcacattatggaattagatgatgcattaaaatttattctcaatttgaccactctaacgggtgaacctatgtctagaagactcnatactcttgagatatctatcatgtgtaattatcatccagntagtcttctttctacacgncataacnnct

SEQ ID NO: 1525 - DNA, 676 bp, Ctenocephalides felis
  misc_feature (5)..(5): n = unknown
  misc_feature (666)..(666): n = unknown
  misc_feature (676)..(676): n = unknown
gccgntgaagccgcaccagctccagctgcagcccccgccgccagcgaacgccaatcatccaggggatcccgcaaagccgtcaagcgcagtggatctaacgttttctccatgttctcacaaaagcaggtagctgaattcaaagaagccttccaactaattgaccacgacaaagatggtattcattggaaagaacgatctccgtgccactttcgacgaattgggccgtttggtacaagagaaagaactcgacgacatgatcggtgaggcttcaggaccaatcaacttcacccaattgttgaccttgttcgccaaccgcatgtctggatcaggtggtactgatgatgatgatgttgtcatcaacgccttcaagaccttcgacaacgacggcaaaatcgacagtgacaggttacgtcatgccctcatgacctggggagataaattcactgccaagaagttgatgacgcctacgaccaaatggcattgacgataaaggcttcattgtacccagaagctcatcaaatgtgactgcgtgcgaagaagacaaaaagtggtgaatataagaaattgaatacttctacatatacatttaaacactgttacccattgtgggatatgttaaaatgaactacatattttgcaactataataaaagtatgaagatgacanacaaatatgn

SEQ ID NO: 1526 - DNA, 647 bp, Ctenocephalides felis
  misc_feature (552)..(552): n = unknown
  misc_feature (614)..(614): n = unknown
  misc_feature (631)..(631): n = unknown
gagacatcgaaaaagtaagttttatagaacggccgcttacactttacacaaccaaaattaatctgctgaagaattttacgaagactaattagttttaaatctacagtatggatgtgttgaataggcccgctcacgaatttggaaatgatgaaacagttgaaactttatgggctatgaaagccatggatcatgttattgtctattttaatatactttgctctgtagacccaaaatttctcaaaatgtgcccccaagatgaaattatctaccattgttttcgtcaagaatttccagatatggatgttaaagtactagatgaaaattcattaaaaggctatacaggaaaatgccgatggagagaattttgtgaacgattcaaacatatagaagattacagttttggtccttaatacgcttagattgcacattggattatagtccagaaaatactattttagttccaagagttcagttttatgcctagaatctgtcgaaataaagaaggcttatgctgatcagaaaaaaatatgctaatgaagtgatgttgcgagnatgaaaatgaaatccatagaaatatagcatggtatgttaagagtcatgagaaaagggggtanttattttatttataatnttatcaaaaaaaaaaa

SEQ ID NO: 1527 - DNA, 540 bp, Ctenocephalides felis
gaggatgccaaaacagaaccgtgtcgcaatctacgagcacctctttaaggagggagttatggtggccaagaaggactaccatgcaccaaaacacccagaattagagcaaattccaaacttgcaagttattaaggctttgcagtcgttgaaatctagaggatatgttactgaacaatttgcatggaggcatttctactggtatctgacaaatgaaggtattgaatacttgaggacatacttgcacttgcccccagagatcgtgccctccactctcaaacgtcaaaccaggcccgaattggcaaggccaagaccagctgccggcccaaggactgaaggatctcgtccagctgaagacagatctgcctaccgtagggcacctggtgcacctggtggcgctgacaagaaggctgatgtcggtgctggcactggagacttggaattcgtggtggatatggacgtggcagacctgccctcaataaatttatataagtaatttataataaattcaataaaacatttatgataaaaaaaaaaaaaaaa

SEQ ID NO: 1528 - DNA, 671 bp, Ctenocephalides felis
  misc_feature (4)..(4): n = unknown
  misc_feature (570)..(570): n = unknown
  misc_feature (594)..(594): n = unknown
  misc_feature (598)..(598): n = unknown
  misc_feature (634)..(634): n = unknown
  misc_feature (640)..(640): n = unknown
  misc_feature (650)..(650): n = unknown
  misc_feature (671)..(671): n = unknown
catnaacagatatcccgatgatccaaagcatcaaaatgatttagcagtaacactacttatgggaaacagaccagctgaagctttacgcgttttgcacaaagttttacaagtttggagaaataatggttttgcattggtccactatggatttatttataaaactactatgaacgacttggaaagaggtgtaaaatatttgcaagaaggtattgacaccaaagataatggcacaatggatggaagattcttgtttcacctcggtgatggattgcaaagactgggcagaaatgatgaagctatgaaggtttatgaaaccggagtaaaaaataaaatcttcctatctcgatatcaacgttcactctataatattgatagattagtgtccagaccctggtggactattgaacaaactggttatactaaactttttaatacattaacttctaattggaaagctattcgagatgaagctttaaccgtgcttgcatgcaaaagcgcaagagtaaggaaaaattgcagaatcaaaatctgggcctgttagagccaggcagaaaattaagagatctgggnatggagcagttgacttatcggagnatangataccggttgtttacccatacagccgctatttgcntcaganctactgcctnggcaataatcactatgaccgn

SEQ ID NO: 1529 - DNA, 667 bp, Ctenocephalides felis
  misc_feature (4)..(6): n = unknown
  misc_feature (41)..(41): n = unknown
  misc_feature (61)..(61): n = unknown
  misc_feature (179)..(179): n = unknown
  misc_feature (543)..(543): n = unknown
  misc_feature (623)..(623): n = unknown
  misc_feature (629)..(629): n = unknown
  misc_feature (653)..(653): n = unknown
aggnnncacgcctatgctcaaaagaacttgcgcagatctgntcgtcgcattaaggaacttnccttccaagctgaagaagaccgcaagaaccacgaacgtatgcaagaccttgtagacaaattacaacaaaagatcaagacttacaagaggcagatcgaagaagccgaagaaatcgccgncctcaatcttgccaaattcgcaaggctcaacaagaattggaagaggctgaagaacgcgctgacttggctgaacaagccgtcagcaaattccgcgcgaagggacgtggtggatccatggcacgaggtggcagcccagtgcccgcaagaacagcagctcgcccacaatttgacggaatggctttcccgctaggttcgacttgaaccctgacagcgagttctaaattatttataattaattttaaaaaagcgaacgtggctgcttgacagtaaacattaatattttttaaaaattattaaaagtaaaaaatatcagctcgttcaattgtgcttagtatgacatttgatctaatctaacactgtcagnctaacacattatactatttatcgcccatacatcaacgtcgctgcataaaatatacagctccattagctcctaattcttanttttgnaatacttttttgcgatttatcaanggaattattatgtt

SEQ ID NO: 1530 - DNA, 670 bp, Ctenocephalides felis
  misc_feature (517)..(517): n = unknown
  misc_feature (608)..(608): n = unknown
  misc_feature (612)..(612): n = unknown
  misc_feature (634)..(634): n = unknown
  misc_feature (653)..(653): n = unknown
  misc_feature (670)..(670): n = unknown
agcgtgttcgccgaggaggaacgcgcacgttttgacacatttctttagtttttaagataaaatccaatccttcccaacaaaaaattagttttaagcgcacatttatgtttagtgacacgaaggcggttgttataaaattagtgtttacgtgatgtctaaacaacagtacacagttgacggtgatctattcggtacgcctcacaggaaaaaaccagtgccttggaatgagttcttgtacaacagcgaagagggaacagtcttaggaaggacaggactgagttgggcgaaaatcggtatattctacacaatattctacggagtattggcagcattagtggcaatatgcatgtgggtgttcttccagacgttagatcctcgtataccaaaatggcaattagacgaaagtatcataggaacgaatccaggccttggcttcaggcctttgccgccgatgagaacatagaaagcacgctcatctggtacaagggtaccgatttagacaactacagtcgatggncaaatcctttagagttcttcaatttacaaaactccggatacctcaccgagtaaacattcagtgtgctccactcgccgcccaaagttgggtngcgngacgcaagttggtcctgtcganaaacatttatatacagacngcgggtatttgagtgan

SEQ ID NO: 1531 - DNA, 558 bp, Ctenocephalides felis
  misc_feature (3)..(3): n = unknown
  misc_feature (5)..(5): n = unknown
  misc_feature (33)..(33): n = unknown
  misc_feature (35)..(35): n = unknown
  misc_feature (40)..(40): n = unknown
  misc_feature (111)..(111): n = unknown
  misc_feature (172)..(172): n = unknown
  misc_feature (238)..(238): n = unknown
  misc_feature (408)..(408): n = unknown
  misc_feature (456)..(456): n = unknown
  misc_feature (544)..(544): n = unknown
aantngtcgaggtcacgaatctgaaaatgagtngncaccnattcagctgatctctgccacagcttaccagctcaaaaaacccaatcaacaaatgttgatcccaataactgnttggattggtatggagcaagcattcattggtgctgatttcacacaggcctatgtatcctgngcttttgggtattaagtcaaattggataccgtcatgatctgcttcggagtagtcaacgcaatttgntcagtcgtttttggttctataatgaaattcatcggtcgccaaattatcatcactttcggtttcttcctgcacatgggcctgatgattggattattattctggagaccaagccctgatgataaaatgatgttctttgtcatggctggactttggggagttggcgatgcagnttggcagacacaaatcaatggtctatacggaactctgtcaggcggacnaaagaggcagctttcttcaactaccgctgtgggaaagcttaaggttgtcatcgttacgctacagcacacacttgtgcccggcatgaanttacgtcaattgac

SEQ ID NO: 1532 - DNA, 660 bp, Ctenocephalides felis
  misc_feature (489)..(489): n = unknown
  misc_feature (615)..(615): n = unknown
  misc_feature (635)..(635): n = unknown
  misc_feature (653)..(653): n = unknown
  misc_feature (657)..(657): n = unknown
gtaaaaacaaaataaaatcattttagtttgagttagaacatgtgttattataagttagcgtaacacacaaaaattaatcataaatgtctgataataattggtagtatacttgtacagtaaattctttattttccttttcccaatctttttctaaaagcgagtgtggtcatactgctgtggtaattcgtcaccgagaagcggatgaagtttatcctccatcattagtgaaggctttgcttgtcagaagagagaggagtgttggttgccggtgtttattgtagttttaatttaattttaaactaagttatgcgtatgacccaagacatggacgatgatgaaaagggaaagcttttcgtcggagggctatcatgggagactactcaggagaacctgcagaggttcttctcgaggtacggcgaagtgatcgattgcgtcgcatgaagaacagcgagtcggcaggtcgcgcggcttcggcttcgtcacatttgncgatccctcgaacgtcacgtcgtctgcagaatggccgactccctggcggaagacttagatcaaacctgcaccccgcccctcagaccaaacgggcgagctcccaagttcttgcggctgcatcacggnggaaccgctagtgtctcgcntacgaaagttgagtgctntgcnacg

SEQ ID NO: 1533 - DNA, 669 bp, Ctenocephalides felis
  misc_feature (600)..(600): n = unknown
  misc_feature (631)..(631): n = unknown
  misc_feature (633)..(633): n = unknown
cacatattcaagttgattcaattcagcaaagattattacaaaaagttgatggtgtattagcagtacatgaatttcatgtgtggcagttagctggagatcgtatcattgcctctgctcacataaggtgtagaaatttatcagagtacatgaaaattgcagaaagagttaaggaattctttcataatgagggaattcattctactacaatacaaccagaatttgtagaactaagaagtttattagagccttcacgagatatggagcaaccatgtgctctagattgcccaattactgatgtaccatgtgctcaagctacttgttgtggaacttccaaaccagatagagataccccatcaccagcggcctcaccttttatgtgcaggcaacgaggagcaggtcaacgagttcaaggtggttcttcaggtccaaacactggtgatctagaaagtggtcattgttaggtggacatccaaccactcagttgttgcaattgcctctggtctaattgtgctgtccaaatcaaataaagaatcttgtgctgcacacattatagcgcaaagtccctgccatcagttgctgatattctatatgcaaattttnataagaatagatggaattatgcagggagganangtcatatgataattattatcattatgtggactggat

SEQ ID NO: 1534 - DNA, 546 bp, Ctenocephalides felis
  misc_feature (6)..(6): n = unknown
  misc_feature (537)..(537): n = unknown
  misc_feature (540)..(540): n = unknown
cttgtnttctgaagcaataatcttgttaaatgctttgggttgtagcaaagatcctgatattttaaggagctacttggaaaaaactgtagaacctgattcgaaaatcagagatcaagataaattccgtgctatgtattctgtaatcagacaaggaagtgatggagtgacaattgcattagaatttatgcgtaataaattgccaaaaatgattgaacaatatacaagcttgaatgcgctcaaaaaagttttcgaaactgtaggcgcagcaatttcaaacgaaaaacaagaagaactgcttcgtgaaattattgctaaatacaattctacattttcggattccctaatgcaaggtgcaaaaactgctttagatgccatggaagataataaaacttggagagataaaaatttagctactgtgacaaggtggtttgaaaaacagcctgaagtttatcctaataatgcaacaaaactagtccaaagtatttattattacttgattgtattcaatattgattatatttaatatatacatcagtntcngaaaaa

SEQ ID NO: 1535 - DNA, 662 bp, Ctenocephalides felis
  misc_feature (517)..(517): n = unknown
  misc_feature (630)..(630): n = unknown
  misc_feature (637)..(637): n = unknown
  misc_feature (660)..(660): n = unknown
aagccgtggtagtttcgctgtatgaggaacctattcagcctcaacaagctgcttctgtcgtggagaaacttggtgactacctcataacttgcggctactaaatgtgaaacactggagtggccccttattaatttttaagaaaactataataattataattacgattaatgaataaatttaaacaatgaagaccggccagcaaaaagggacagaatttttttctcatgcctcctgcaatgcagtaaaatattttgtgccatttttgtgcctttgttcccggtgacctttttttcctcagaagggacacctggagtgtactggcaaaatcgaggacattagtttaaacatttgtattataaaaccgtgcggacggcaaaatgaataaaaaatcttactacgattaaatttgtattaatttcgatgtgaggttatcgacttgtggatttaaatatactttctcctttaataaaactcgtgcttttgcaatttatgatttgctattattagctattgatgnataaatctgtatgaattttgatccctcaataaagaatttatatagtgactagctctcagtttgaatttattatatcgtattgtgcaaagccgaccatagttgcgactgactcncgttctnttgtgctgacttgtattgctatnct

SEQ ID NO: 1536 - DNA, 668 bp, Ctenocephalides felis
  misc_feature (556)..(556): n = unknown
gaaatatttacctacattagctttgccagatggatcccataattttacggaagattctgtattttttcatttaccaggattacaaaaggatgaacagactatttttggagtatcatgttatagacaattaccagtggagaaattagttaatataccttctgatgtaactcgcagcactgttcaaaaatcagtttgtgttctaagcaccttacctttatatggtcacattgagataaaacttgcattaatagcacatgcattttttgaacaaggcgacttcagccaaaccaagatattgcaggatgcatatcataatatgaaccaatgttttggctcaaatgaaattttagaaaaaataactataggattaagtgtcagagatttagtgttgaggtggcgtcataaaatattagttttatttaaattaatattattggaaaaaaaggttgcatatttggttcaccagtaaggccattatgtctagccctattaacttattatctcttcatccaatattatagacaaaggattattgagtcggcaatcaggacacttntataaaagaaaattctagtatatgcaatcagatatatcatgcggaaacagaattaatatctctgatctaatacaaatatgaatgtggaaagttttgagatatctaaatgctg

SEQ ID NO: 1537 - DNA, 620 bp, Ctenocephalides felis
atcaacttggattttgtcggttaattccgaaatcgaaaaagtttttaagtgcaaaacatttaactgtgacatcagtttgtaatgtatctgggaaggaaatgagatctgtaaatccgattgaaaggtttcctccttatgactataagaagaaaggatacggatttatcaatgcgttttttgattacacaactaagagattcaatgataacacaaaggttattacagtggaaggtccaccagctgttggcaaaactgcatttgctaaagctttggccgaagatttagatatgaaatactttccagctgttactatggatcactactatattaatgaatatgggtatgatctcagacaacttgatgataaattacctgaatcatgtaaaagcatcgattttgataaatttcataaagatccgcataatagaaatgtagcaacaatgcaaattgtgttatatatgaaaaaatatgaacaatatcttgcggctcttgccatttattaaatctggacaaggagttattttagagagacttgtactctgtttgttttctagaacctggctagctggttgttcgcaggactcgtcgatatttgaatagagcacacatccagatgagca

SEQ ID NO: 1538 - DNA, 557 bp, Ctenocephalides felis
  misc_feature (492)..(492): n = unknown
  misc_feature (549)..(549): n = unknown
gtcattcactttttacgagttctttagtgtcctaatttattaataagtatcagaatggtgccgaaaacaaaagtatttgttggaagcttgccgccaggctccaagcctgaagaattacgtcgtttgttcgaagcttacggtgttgtaacagaatgtgatattatgaatcgttgtggctttgtacatatgcagaccgaagagatggcttttagcgcgattcaagcgttgaataatactacatttaatggggccacgataagtgtcgaaaggggccgcatcaaggaacgcggatcaggtggtggtcgtggaggcggtggccgcggcggtcgaggatttggaggacgaggaggtggtatgaatcgtagtggtggaggacctgggggtatgcgtaatggtggtggccccatgggaggtggcatgcgtcgtggaggcggtggcccaggacccatgcgtggtggtggccgtgacatgaatcgtggacaccctattctngtgatggtggcgtggaggagatttggtggcgagggctggacccatgccaatggttgncgcgcgga

SEQ ID NO: 1539 - DNA, 556 bp, Ctenocephalides felis
gcgtgccttacctccgagctgttgttacttgttcattttcgccggtttgcgttcgaggaaattttgttttcggacgcacgtgagcggtaacgagtcctgcaaagatgtatataaaattctgtttattggcattcgtggcggctgaactaatgttaatgttagttgaggccaatgttattcctggtgaagaagaaaagagcgatggattcgagctgctcattctgcataacaacgacatgcacgctcggttcgagcaaacggcggcacgcagcggcccctgcgtagacggagaacgatgttatgggggcttcgcccgggttgcacatttagtacgggaagctcgcaagaatgaatctaacggcggccctcctgtgctgtacttgaacgctggcgatcatatcaaggaactccttggtacacgctttacaagtggaacatatcttatatgatgtaaacgaactcgctccagatgccatgtcgtgggaaatacgagttcgacacggtgtcccaggttgctccatttctggaaaatgtgaaatttcagtgtagctctacc

SEQ ID NO: 1540 - DNA, 620 bp, Ctenocephalides felis
cctacttacaaattaacgtacttcgacctcaaaggaataggagagcctttgagacttctactaagctatgggaacataaaattcgaagatgtccgagtgtcatttgaagaatggcctgcacttaaaccaaagatgccatttggtgtaatgccggtattggaggtcgacggaaaggaactgcaccagagtttggcactttcgcgctatttgggaaaacaattcgggctcgggggcaaaaatctaatggaggagttggaaattgactcaatagtcgataccctgaacgatttcagatataaattgacgatggcctattgggaacaagatgcggctgtaaaggagaaaaaaatgaaagaagtacacgatacactcatcccattttatacagaaaaacttgataaaatagcgaaggctaataatggcatttagctcttggaagactaacttgggccgctttgtttcgcggagttatcgaatatatgagtttcatatctggaacagatttccttggaaattgcaggattcaagagtgctttaatatgtgcaattgccgacgtgaaggaatggtcgcaagaggcaaaactgttgtatgtcatttgggaatttaaataacattatac

SEQ ID NO: 1541 - DNA, 620 bp, Ctenocephalides felis
atttgaatcctcttatcgattactaatcttttgtacagtttaatatttattatcaaggccttgtacgccagtgtgtgtaaaggtctcttcagtcgacgacagaggatagaagtcagaggacatttataatacgcagtttttaagttttttctggtgaatttgaatatatttgaagaaaatgaagaggtttttggttgctttggcggttttggtggtcgttgctgaggctaagctgtcatgttcgagtacaaaagcctcgatccccgaagaatggatcgacatgacagcccagtgcacgaggagcatgaggaaccagatccaagaagaactgagcgcttcgatgcaatacttggccatgggggcgcatttctcaagagacactgtcaacaggccaggatttgctgagatgttcttcaaatcggcaagcgaagagagggaacatgccatgaaactcatgtcttacttgatgatgagaggagaactgccgagaggctgcaggacttgacagaacaccactgtccaatcacacttggctgtggttgagtgctttgaagatctctgaatggagcttcgtccagaaataacatgtgacaaagcttgcagacatatggactatgata

SEQ ID NO: 1542 - DNA, 591 bp, Ctenocephalides felis
  misc_feature (577)..(577): n = unknown
  misc_feature (580)..(580): n = unknown
  misc_feature (582)..(582): n = unknown
aagaagatcaagaagaagaaggcaaaagaagagtctggagatgccccagccgctgaagccgcaccagctccagctgcagcccccgccgccagcgaacgccaatcatccaggggatcccgcaaagccgtcaagcgcagcggatctaacgttttctccatgttctcacaaaagcaggtagctgaattcaaagaagccttccagctaattgaccacgacaaagatggtatcattggaaagaacgatcttcgtgccactttcgacgaattgggccgtttggtacaagagaaagaactcgacgacatgatcggtgaggcctcaggaccaatcaacttcacccaattgttgaccttgttcgccaaccgcatgtctggatcaggtggtactgatgatgatgatgttgtcatcaacgccttcaagaccttcgacaacgacggcaaaatcgacagtgacaggttacgtcatgccctcatgactggggagataaattcactgccaagaagtgtgacgctcgaccaatggtcatgccataagcttcattgtcccagaactatccaatgtgctgcgtgcgagaaacaanagngngatatagaa

SEQ ID NO: 1543 - DNA, 554 bp, Ctenocephalides felis
gcaactttgggtctcatggttttccaacagttgtctggaatcaatgctgtgatcttctacagcgtgtccatatttaaattagcaggaagtgacctggaccctgcggtgtcttcgatcatcatcgcagcagtgcaagtggtgatgagtctagctgctattggattggtagagaaatttggtcggaaaactttgctaatgatcagttccacggttatgggaatctgtttggcagctttggggtattacttcagggtgcaaacatcaggcgaagacgtcacctctctgggctggcttcctctgtctagcctggttttgttcatcgtggctttttgcatagcctatgggcccattccctggatggtcatgggtgagattttctctgcgacgttaaaggagctgcttgcagcctaacagtcatcgcagctggtccctcgtctttctggtcactaaagtattccccacatgagggagactttaggaggagatgtaccttttggatcttcactttcatgatatcgtacactgtttcgtgtcttctggtgccgaacaaagat

SEQ ID NO: 1544 - DNA, 604 bp, Ctenocephalides felis
  misc_feature (524)..(524): n = unknown
  misc_feature (545)..(545): n = unknown
aagattacctagacttggaacaagaattcgacctaataaatctaaacagcaaggtaataaggaatctacggaagtgcaatctcaagttgatgctgataaagtaggcgaacaaccagcagagaatgtggttgagcaaagtgccgaaacaaaagctattgccgaagaagatgatgttaaggatgcatggggatgctgattcaagcagtgaagaggaaagcacaactgaaacaccagcagtaactgcaaagtctgaaacaaaagtggatcaatctgcagaaagtaaaaaggaagaaacttcttcagaagaagagtctgaagaagaaagtgattctgagtcagaatctgaaagtagcgaagacagtgataatagaactgatgcagaaaagaaacgagaaaaggctctccagagaatacaaaaacgcagaattgatgcagaacagaataaatcattagacaaactgagagctgcggtggttgtgtgttgggacatgtagatctggaaaacaaaaattttgcaatactcnacaaatgtcaagatggtgaantgtggtttctcaccaaatgtgctcaaatgtcatagaaacataaggacagtaaattgtaa

SEQ ID NO: 1545 - DNA, 608 bp, Ctenocephalides felis
  misc_feature (4)..(4): n = unknown
gccntttttcgatcaattcgtattagactttttgataaaaaatgctgtctaaagcttcgcttttggccaaggtatcccggccactgactgtggcagtgcgaacaacatcccaggctgcaacatgccctgctcctacaaaggtagaagaagccgatagtgctgaaagagatttggtcaacttcccaaggccaacacgtttggaacattcacctaaagttcgctttggattcattccagactcatggtttgaatttttctatgagaagaccggtgttactggaccttacatgtttggaactggtttaattacttacttatgttcaaaggaaatttacgttatggagcatgaattctatactggtatttcattgggtattatctgtctctatgccactaaaaagttgggtccacatattgcaaaatacttggacaaagaagttgatgcctatgccgatgaatggaattcaggtcgtgtagaagaagttaaaagttaccaagatgccattgaaggagaaaagttggacaatggagactgaaggcaacttatgttgatggatgcaaacgtgaaatgtgcttgcacttgaacactacaggaccgcctgaaggta

SEQ ID NO: 1546 - DNA, 595 bp, Ctenocephalides felis
  misc_feature (5)..(5): n = unknown
  misc_feature (531)..(531): n = unknown
  misc_feature (579)..(579): n = unknown
agacntacgagcaccaagtggacaagacacacagtggacaaacagtgaaattgttgatttgattgtatcagtgatagccagtgatataacaatattgtgttaaaaaatgatgacgccgaccgaaattagcaatttgaaaaaagtgaagttggagaatttttgggacgaggtcgatcccaaaaacatatcgcctgagtatccaaaaaatgaaatccaggattttttcagcggcggaagcgtcttcataaccggcggtaccggatttttgggaaaattattgatagaaaaaatactgaggacatgtcccgatttgtcaagaatctacatcttggtccgagacaaaaaagggaaagatgcaaaaaatagattaaaagatatgttaaatgatgtggtattccagcgattaaagaaagagagtccgtggcccaacaaaaattggaggttgttatggagatgttggcaagcccgatttagggttgcggaagtgatagaaaaatatacaggatatgcaacagttatattcacgtacancctgcaatttcacgaccataaaaactcagttgcataatgtaagggcantagagtgttgaactgc

SEQ ID NO: 1547 - DNA, 595 bp, Ctenocephalides felis
  misc_feature (4)..(4): n = unknown
  misc_feature (34)..(34): n = unknown
atcntatcggtgtgtttatatccagaagctccgncaacttgttacaattgaaacaagtatggatcatgtcggtgttccaattcatcaacgttttggtgcttctattccaagttttgtatgggtacattcctaatatctggattgtttttgccatcgttttatgggaaggacttctaggaggtggtgcttatgtcaacaccttctacaggatgagccatgagattccaatggaaaaacagaagttctctatgtcaattactgctattgctgatagtctgggaatagccttggctggatggatagctatgccaacacataatgccttgtgtgctttgcctaaaccaacttaagtgaataaaatttgaccaaatccaactttaggtggatgaaattaaagtttagttgtttgcgagtgcaagtgtagataattgaaccagtgaaatagtttttaacgtaaaatttctatcagaaaattatcattttaaggaacattgtggataataaaaccttagcttaaattaaatacccacttataaactaatatcgagtattctctattaaatcaatcgaaccgtcatgtgaatcgaatatttga

SEQ ID NO: 1548 - DNA, 653 bp, Ctenocephalides felis
  misc_feature (4)..(5): n = unknown
  misc_feature (552)..(552): n = unknown
  misc_feature (583)..(583): n = unknown
  misc_feature (632)..(632): n = unknown
  misc_feature (643)..(643): n = unknown
gaanncaatagaagacctctagtaatggggtcagttggaccttatggagcacatctgcacgacgggtcagaatacagtggctcttatgcaaaaacgatcacgaaagaggaaatccaagaatggcatagaccaagaatagaagctttaataaacgcaggtgtagacggattagcaattgaaactattccatgtcagttggaagctgaagccctagttgaactaatagttaatgagtatcccggcacaaaagcatggcttagttttcaatgtcaggatgaatctcgtctcgcccacggcgagttattccgcgacgcggccttgagctgctgggagctggcaagggagtcccaatgtttactcgctgttggggtcaattgcgttcatcccaaatacgccgtcggtctctgcaaatccctcaatagggatcagatgccccaaataccgtcgtgttatcccacagtggcgaaaattacacccgccgaagggtggaaagataagaccgtgtgttctgtccaagatacgtcagttctggttggatcaggacccttttanggaggatgtgcgtctgtgcaggcatagaatntagaaattggatcgtggatataacggattaataatttaataaataattnttacgaatttntataatgtgg

SEQ ID NO: 1549 - DNA, 553 bp, Ctenocephalides felis
ctcgttcactgcatttatcagcaatggctcagattaaggtaggcgataaaattccgtcggtagacttatttgaagacactccagctaacaaagtgaatattgcaaatctcgctgcaggaaaaaaagttgtcttattcgctgttcctggcgccttcactccaggatgttctaagactcatgtacctggctatgttgcaaaggctgaagaattaaaaaagagtggaattgctgaaattctttgcgtctctgttaatgatccttttgttatgagtgcttggggtaaggatcagcagagcaatggaaaggtaagaatgcttgcagatccaagtggtacattcacaaaagaacttggattgggagttgaattgcgcccttaggaggtttacgttctaagagatctctatggtgatagacaatggtgtcgtatcagaattgaatgtagaaccagatggtctggactttcctgttccttagctgacaaacttaaagtttagaatatagtaattattgaaataagagtaataaatataatgtaatattaaaaaaaaaaaaa

SEQ ID NO: 1550 - DNA, 661 bp, Ctenocephalides felis
  misc_feature (5)..(5): n = unknown
  misc_feature (627)..(627): n = unknown
gaacntcgtgctgatagcgcgcgcgttccgtcaccaattcataattccggacttccaaggattcgcgaaggacttggaggaagtgtactggaagtgcaagggcaataacgatggcaaggtgggcagaccgtcgcgcgttgtgaacccggacgacgatcccgccggcgaaaatgttgctagctacattccacagcttggctcgcatgaaccctgatttttggggtgtgagcgtctgcaccattgacggacaaaggttgtcgattggagattgcaatgtgccatttactttacaatcttgcagtaaaccgttgacatatgccatagcattggaaaagctaggccaggcgacggttcatcaatatgtcggtcaagaaccaagtggtagaaactttaatgaactcgtactagattataataaaagaccgcataatcctatgataaacgctggagcgatattggttgtcgtattgaaaacttagtcaaacctgagatgactctactgagaagttcgactatatgaccacatatttaagagattggtggtggaagagtctcggctcaacaaccggtgtcttgcggacccgaagccgcgatagaatacctttggtttactgaggaaccagtctnccggtaaactaatacggatctgcttatttatgtg

SEQ ID NO: 1551 - DNA, 671 bp, Ctenocephalides felis
  misc_feature (630)..(630): n = unknown
gcattattagctaacgatcttcataatatatttgtcaacagtaatctaacgcatttgagaaaacttcacttggaacaaaatgaaatattaaattttggagacaaaagagttttctgcgatttacctagtctgcgagatttgcatttgggtgataattatttatcagagatagactttaactttttgtgtcttaagaatttacggtttcttgatttggaacggaataaaatcgaatacttcaagaagcgtgacctgctcaccctggaccaggtgaatgctgctggccgagaagagcagttggtcatcgatgttggcggcaaccctttccgatgtgattgcattgttagcgagttttattcatggctgttccgaactaatgttaccgtcaggaacaaggagtctttacggtgtcatcgcgcccaaaagcatggcggggaagcattgatcagcctatccgtcgataaatgtcgaaaagctcaatctgtagtgcacgatcgagtaaaatatctaccgtgactttatgctgattattttaatagtcatttttctggactgtcgcgtctggctacatgagcagagataagttgaaatagcattactctgtgatagaaccgtttaaaaagtcaattnccgatccgaacatgacagaagttatataggaattgtgcaat

SEQ ID NO: 1552 - DNA, 611 bp, Ctenocephalides felis
  misc_feature (4)..(4): n = unknown
  misc_feature (35)..(35): n = unknown
  misc_feature (583)..(584): n = unknown
cacntttaccatcgtcgaaagttgaagtcaccgtncagaagttaaaggatgatcagaaactgaagagtcagcaggagagtgcggagaatgtttccacggttacggctctcaaacctgcagatagtgccgagataacagttgtgaagaaaacgctgaaacagaaaataatacatgaacttctacattactaccatggttttcgacttcttttcatcgatttaaatgtatccagaaaattaatatggcgagttctgaatggaaaccagttgaccaggagggaacatagattgctagtgagaaccactgctgatcttttcagacttctgccattttctgtgttcattattgtgccttttatggaattactgctgcagttgccattaaactattcccaggaatgttgcatcgaccttcaaactgcccagagagagaggataaattgaaacaaagtttgaaggtaaaactagagatggctaaatttctgacggaaacattagacgacatgactctacacacaaagatcacagatcagaattggctaaagagttcaattgggttacgaaatgagacagctgcctcagcnntacgaagaatcatgaaattcaaaatgt

SEQ ID NO: 1553 - DNA, 566 bp, Ctenocephalides felis
  misc_feature (4)..(4): n = unknown
  misc_feature (6)..(6): n = unknown
  misc_feature (35)..(35): n = unknown
ctgntngacaagaattgattgacagatttaatgangatgaagaaatttttatatttttattatctacaagagcaggtgggctaggaattaatttaactgcagctgatactgtgattatacatgatattgactttaatccatacaatgataaacaagccgaagacagatgccacagaatgggccaaaagcggccagtaactatttatagattaattagtaaaggaactattgaagagggtatgcttcaagttgctagagaaaaacttaatttggagagagaagtcaccactaacacggagaatgatcctcaagaagtaaaaaatgttgtgcgattactcacactagcgctgggcgtcgattcaaataaagctgccaatcttttaactccatcgcgagaaaatcggaatcctaattgcaaaagccgctattatttagcacacattatgaattttgatcttttaaatttattagttaattgatgattatttaaaaatataggtatttttatataatttatgaattactgcagcgccaataaaatccgtttactctaaaaaaaaaaaaaa

SEQ ID NO: 1554 - DNA, 585 bp, Ctenocephalides felis
  misc_feature (5)..(6): n = unknown
  misc_feature (535)..(535): n = unknown
acttnnctccatgcaagcctctcttgaagccgaagccaagggcaaggctgaggctttacgcatgaagaagaagttggaagccgacatcaacgagcttgaaattgctctggaccatgctaacaaggctaacgccgaggcccagaagaacatcaagcgttaccaacaacaacttaaggatgtacaaaccgccttgaggaagaacaacgtgcacgtgatgatgcccgtgaacaacttggcatttctgaacgccgtgccaatgctctccaaaacgaattggaagaatcccgtaccttattggagcaagccgacagaggccgccgccaagccgaacaagaattgggagatgctcacgagcaattgaacgaactttccgcacaaaacgcttcagtatctgctgcaagaggaaattggaatccgaattgcaaaccttgcattctgacttggacgaactctcaatgaagccaagactcagaagaaaaagcaagaaggcatggttgacgcagctaggttggtgtgaactccgcctgacaagacntgcccaaacccaagagaactcagaaaggtcttgaacacaaataagaattg

SEQ ID NO: 1555 - DNA, 612 bp, Ctenocephalides felis
  misc_feature (5)..(5): n = unknown
  misc_feature (34)..(34): n = unknown
  misc_feature (570)..(570): n = unknown
  misc_feature (591)..(591): n = unknown
agacngctgtttttgtgttcaaaaagcagtaaantatagaaaaaaaaaacttattactagtgcacattaacaaaaataagcagaacaactattaaaaatatgttttccatgtcaaaccttttctaaaaaccattcaatgcatagaaatgtaatttttaaaatcaatagtatgattttttaaaatatttggttttataccaggagtggactactgaatttctgcagtgttgctatggctctcaatgatctagggtacaaagctgttggtatacgaatagactctggtgatttagcatatctctcagttctggccagagaaacatttgagaggatagcagagaaatacaacattccttggtttgcaagactcatgataattgcatcaaatgatatcaatgaagacacaatactcagtctcaatgaacagggacacaaaatagattgttttggaattgggacgcatttagttacatgtcaaaggcaccagcacttgttgtgtctacaaaatggtagaaataaatggacacctcgaataaactcagccagatgtgctaagtacatgccagtcgnagatgcctatcgttatatggnagatggcatgccctatgctgc

SEQ ID NO: 1556 - DNA, 613 bp, Ctenocephalides felis
  misc_feature (611)..(611): n = unknown
gtggttcaaagataatccaagatgggtaagggaaataatatgatccctaatgggcacttccacaaagattggcaacgttttgtgaaaacttggtttaaccagcccgcaaggaaaattcgaagacgtcaaaacaggattaaaaaagctcgtgccttgttccctcgtcctgctgctgggcccctcagaccaattgtgcattgccccacagtgcgataccacactaaggttcgagctggcagaggttttaccctcgaagaaatcaggggagcaggtttgaatgcaggatttgctcgctcgattggcattgcattagatgttagacgtcgtaataaatctgtagaatctttacaacagaatatacaaagattaaaggaatacagatctaaattgatcttgttcccaagaggtggaaagaaattgcataagggtgaagcaactgaagaggaatgcaaggttgcatctcaattagaaggcgtcgtgatgccaattaaacaaacttcagttaaatctaaagtcgtgtcattctgaagatgaaaagaaattctagctttcccacttaagaaaggtcgtctgtcagcgctggtggtttcgtgaaaaggagtaaagatcantg

SEQ ID NO: 1557 - DNA, 659 bp, Ctenocephalides felis
  misc_feature (4)..(5): n = unknown
  misc_feature (586)..(586): n = unknown
  misc_feature (611)..(611): n = unknown
aatnntattctgaatactatgttcgattttagcgttttcccggcgagcttgatataatattaattgtttggagtaaaaacaacaaattttcgaggattaatttatacaaaaaataattaaaatgaaattagttaggtttcttatgaaattatcacacgaaacagtgtcgatagaattgaaaaatggaactcaagtaaatggaacaataactggcgtggatgttgccatgaatacgcatttgaaagctgtcaaaatgactattaaagatcgagatccagtatttcttgatactataagtttgagagggaataatattaggtactatattctcccagatagtttaccattggagacccttttgatagatgatacacccaaagccaaagctagaaagaaggaagcagctcgaggtggaatacgaggaaggggtcgtggtcgtggtggcccagaggcggtcgtggaggtggtaggggacgtggacgaagataataatatttttgattgtaagctattataatcattgaacattggctcataggaaggctatcaatttgatgtataatgtatttgatcaacaagaatttangttgatccatttttaaccaattttnttgtggctaatcagtttgagtcgatcatattctgatgttatatgaaga

SEQ ID NO: 1558 - DNA, 564 bp, Ctenocephalides felis
  misc_feature (206)..(206): n = unknown
  misc_feature (223)..(223): n = unknown
  misc_feature (227)..(227): n = unknown
  misc_feature (295)..(295): n = unknown
  misc_feature (511)..(511): n = unknown
  misc_feature (519)..(520): n = unknown
  misc_feature (524)..(524): n = unknown
  misc_feature (538)..(538): n = unknown
  misc_feature (555)..(555): n = unknown
gtactttgctttcatttttttcattattttcaagagcaatggctgaagcacgcgaaagaactttcattatggtgaaacccgatggcgtccaaaggggtttggtaggaaaaatcatcaaacgattcgaaagctaaagggattcaaacttgtagcaatgaaattcatgtggccatcagaggagctcttgaagaaacactatgccgatntttcttgccagaccttntttncttggactagttaaatacatgagctctggccctgttgtccccatggtctgggaaggcactaatgttgnaaaaactggtccgtgttatgttaggagctacaaatccagctgactcgaccccaggaaccatccgaggagatctctgtgtggaagttgccgcaatattctccatggatcagatggtgtagaaagtgccaagaaggaaattgcttatggtcactgaaaaggaagtaatctctgaccccagctcatgaatcatggtttatgaataatggtgataatttngattttgnntaanctgattaaaaaaantatgtgaataaaaaaanaaaaaaaaa

SEQ ID NO: 1559 - DNA, 617 bp, Ctenocephalides felis
  misc_feature (5)..(5): n = unknown
  misc_feature (532)..(532): n = unknown
  misc_feature (544)..(544): n = unknown
  misc_feature (547)..(548): n = unknown
  misc_feature (562)..(562): n = unknown
  misc_feature (573)..(573): n = unknown
gtggntttcataggatgctcttggggtttccccagtgggtccaccaatgtaaataatcgaatcgttggaggcaaagacaccacaattcaagaacatccttaccaagtatcaattttgtacaatgatgaatatcacagctgtggaggttctttgatttctgaaaaatgggttttgacagccgggcattgcatcgattctttcaaattctacatccgtgtgggaagttctcttgaaggcgaaggtggagctgtgcatcgagctctaaaacaatatcgacatgaaaagtttgatgcaaaaactgtagattatgattatggattaattgagttagacacaccggtacaacttagtgaaaatgtaaaattagtcaaattggctgaacctggtgttgaacttgaagaaggaactctactaaatgtcacgggatggggtagccgcgatccagcgcactctcaaatagtaactgaccatatgtatcccaagaagttgcaaaaatacattcagacaggtgatctcccatatatgttctgtntggtaaatgcanganngaagactgcatggnacttggtggcngtgatcaatggatccattggatggttctgagcttgtggcctacc

SEQ ID NO: 1560 - DNA, 659 bp, Ctenocephalides felis
  misc_feature (5)..(5): n = unknown
  misc_feature (589)..(589): n = unknown
  misc_feature (640)..(640): n = unknown
  misc_feature (647)..(647): n = unknown
cttanatgtgtggaatttgtgactgtgatcctgcacactttggaagacattgcgaatgttctgctacagatgtaacatcacacttagatttggcgatgggatgtagaagggataataccaccacagttgattgctcaggaaaaggaacttgtgtatgtggtgtttgtgaatgcgaacagcgtgccaatatcgaagaacaaatctccggcaaatattgcgaatgcgataacttctcctgcgaccgtcataatggtattttatgctctggtccagaacatggtgtttgtgtctgcggtcagtgcgactgtctgcccggctggaccggccctgcttgcgattgtagagataccaatgctacatgtatcgctccaggatccacaggcgaagaaatgtgctctggacacggagtttgtgaatgcggagtttgcaagtgtgatgttgctgaggatggcagatattcaggaagatctgcgagaagtgtcctacttgtcagccgtgcaggagttcaaagaatgtgttatgtgtcaaatgtataaaactggccctcacagaagagaatgcggaaattgacatctccatcgtcaagatnagtgaactgtgaagtaagatacattatgtctctccacgaaacatgccattnatctttntcacaaaagcaa

SEQ ID NO: 1561 - DNA, 662 bp, Ctenocephalides felis
  misc_feature (6)..(6): n = unknown
  misc_feature (624)..(624): n = unknown
  misc_feature (653)..(653): n = unknown
  misc_feature (662)..(662): n = unknown
cggaanctttaaaaaatgagtgctcctacagtaacaattgcccagggcactttatcaggaaaggttctggttaatgaaaatggaaaagagtaccatggtttttgtggaattccatatgctgctgctccagttggcaaattacgtttcaggcctccacaaaaaccagaatcatggagtggtgttcgtcaagccactgaacaaggcagtgaatgttcatcgaaacatatgcttttgcaacaccctataggaaccgaagattgtctctttgcaaatgtctatattccccaaactgatgccaaaaagcctcttcctgtcatgttttgggttcatggaggaggttttgtcatgggatcaggaaatactgacatgtatggtcctgattatctcatggactacgatgttatcctggcaccttcaactatcgtctcggagttctgggatttttgaatttagatttggaagaatgtctggaaatgtcggactaatggatcaggttgctgctctcaaatggcaaaacaaaacattgcaagtttggtggtgatcaaacacattctattttggagaatctgtgtggtgcagctacattattagttgctgatctacagaggttgtccaaaagcatgncaagtgaggcttaaatcatgcttcacgcncactaagan

SEQ ID NO: 1562 - DNA, 655 bp, Ctenocephalides felis
  misc_feature (5)..(5): n = unknown
  misc_feature (549)..(549): n = unknown
  misc_feature (562)..(562): n = unknown
  misc_feature (615)..(615): n = unknown
  misc_feature (620)..(622): n = unknown
  misc_feature (630)..(630): n = unknown
  misc_feature (636)..(636): n = unknown
  misc_feature (645)..(645): n = unknown
  misc_feature (653)..(653): n = unknown
gaatntgctactttacaagccgctattgaagcaatcagttcaatgaacatgtttgacctaggaggccaatttttaagagtgggacgtgctataacgccgccgaacgctcttatgggaccgacaactggatctatgatgccgactgctgctgctgttgccgcagctgccgccacagctaaaattcaagcgatggatgcagttgctagtaatgctgtcgctttggggctgccgagtttgagttcttcacctacaattccgttatcagtgccgacgatagcggtgccgcccatcgcaacgataacgccatcagctcccgttgctatatccggtgctgttaagttaccaggtgtcgtcataccgcgcaggtgtcgtcgtacctcaagtcatacagcctccaggaattgtgacgccgacatcgcaaccagttataattccagtatcagtattacctaattgtgaatcttctccgacgatgatatcaacaagctcacctgcacacagccgatcacaatactacacagaacaatgaagccagaatggccaagaacncacaagagacttnaaaaaactatagatgaactgacccaacttacagacaagaacatgtgctaaggnaaagnnncgcctatntcaagntatgaagangatcactnta

SEQ ID NO: 1563 - DNA, 651 bp, Ctenocephalides felis
  misc_feature (3)..(3): n = unknown
  misc_feature (518)..(532): n = unknown
  misc_feature (534)..(535): n = unknown
  misc_feature (538)..(539): n = unknown
  misc_feature (541)..(541): n = unknown
  misc_feature (543)..(545): n = unknown
  misc_feature (547)..(550): n = unknown
  misc_feature (573)..(573): n = unknown
  misc_feature (591)..(591): n = unknown
  misc_feature (602)..(603): n = unknown
  misc_feature (625)..(625): n = unknown
  misc_feature (632)..(632): n = unknown
  misc_feature (640)..(640): n = unknown
  misc_feature (642)..(642): n = unknown
  misc_feature (647)..(647): n = unknown
  misc_feature (650)..(650): n = unknown
ctnttcagataattctttttcaccaaaaaataatatctgtaatttacctcgttaataatggctgcttcagcaattccctttattattttcaccgtcctttggggtatagtgggtgtcgttttaccttttatagtgccaaaaggaccaaacagggggattgtgcaagtcgttttgatattgacagcagcttgttgctggctcttctggctctgctgctacatggcccaaatgaaccccctaataggacccaaactacaccagaacacgattttattgatggcaagagaatggggaaatccaatcagcgatttgtaatttagtcaaccaacattcctgaatatcttctgatataaaatttcatactgtgtgatgatgataaatgaagataatatgatttacatttcacataaatgtgtacatataattttaagaacaagttattaatttgcgtgattgtatatagatattttatgagaactattcgttgtagcaaatatatgtgtcctgggagaaaaatnnnnnnnnnnnnnnntnnttnntntnnntnnnntggggggggccggccccatcccntaaggggggtttaaatancggcgggtttnnccggggatgggaaacctggttnccaatantgcttganantcccnttnc

SEQ ID NO: 1564 - DNA, 664 bp, Ctenocephalides felis
  misc_feature (498)..(498): n = unknown
  misc_feature (595)..(595): n = unknown
  misc_feature (598)..(598): n = unknown
  misc_feature (616)..(616): n = unknown
  misc_feature (619)..(619): n = unknown
  misc_feature (650)..(650): n = unknown
  misc_feature (661)..(661): n = unknown
  misc_feature (663)..(664): n = unknown
cgaataggtccgttttaaattttataaattaaaaaatatatcaaaatgaaaagttttgttccctgtgatccaggatgtgattttcccattcaaaatttaccatacggcgtattttcgacaccggcaaatcctgtgcacagaattggagttgccattggagctctcgtattagatttgagtggagtattgcattttttcaaaccagaatatcagaatgcgcttagtgccacaactctcaacccattgatgggcctagaaaaatctgattggaaacaaattagggagaccatacaaaaattgctgttggaaggttcggaacttcacagaaatgaagaactccaacaaaaagtattgcttccacaagcgtcatgcatcatgcacttaccagctactattggagactataccgatttctattctagcatacatcatgccaccaatgttggaacaatgtttaggggaaaagataatgctttaatgcccaactggaaatatttncggtggatatcacggtcgcgcaagctcagttgtgctctggactgtatccgaagaccatgggacaactttacagtgtggactgacccatttggccttnagnctatgatttgactgaagnganttttgagtgcaagcacaaatggtcaagagcngtgcaatctanann

SEQ ID NO: 1565 - DNA, 664 bp, Ctenocephalides felis
  misc_feature (4)..(4): n = unknown
  misc_feature (586)..(586): n = unknown
  misc_feature (609)..(609): n = unknown
  misc_feature (627)..(627): n = unknown
  misc_feature (634)..(634): n = unknown
  misc_feature (639)..(639): n = unknown
  misc_feature (660)..(660): n = unknown
gtantttttacggccacttcagcttcacccattaaaaatgaagatttggtttggatggaaagcggaaagttcgaaggtgacatggtcttaaatcaggaacaaatgttatcagttttaggacttgggtctaaaaatggccttatcgacaaaaaatatcgctggcccaaaaacgaagtgccttacgttattgtaggaggatacttcaatcgaagtcaaattaattacattcataaggctgttgcagaatttagaaacatttcttgcgttaaagttagacccaaaacagttacggacacaaaatatgttcaaatcacgggtcttccaggcggttgttattctagtgtcggattccaagatggagtccagacccttaatttagcaccatacgaaattgagaaagggtgcttccgtaaagcgactattcagcacgaatttctgcacgctttagggtctatcaccagcaatcgactcacgacagggacgaatacgtgaccatcatgtgggacaatattttgcaaacactgaccacttaacaaatatacggtagtccgtcaggattcgaaccggtatgctattggcgtatgcntacgggcttcggtctcgaaacgngaagacttcgcacaagancacgtgnagatncatggcaaggtgagatatgantcat

SEQ ID NO: 1566 - DNA, 662 bp, Ctenocephalides felis
  misc_feature (34)..(34): n = unknown
  misc_feature (562)..(562): n = unknown
  misc_feature (578)..(578): n = unknown
  misc_feature (584)..(584): n = unknown
  misc_feature (601)..(601): n = unknown
  misc_feature (632)..(632): n = unknown
  misc_feature (634)..(634): n = unknown
  misc_feature (645)..(645): n = unknown
  misc_feature (649)..(649): n = unknown
  misc_feature (657)..(657): n = unknown
atttttgccaaacacgatcaatctcaagctattntcaacagacacaaggatgttttagccagatggcagcgtctcctgggagactcccgtgctcgcaagacccgtttgctggacatgcaagaacagttcagacagatcgaggaattatatttgacattcgcaaagaaggcatcagctttcaattcctggttcgagaatgccgaagaagatctcacagatcctgtcaggtgcaactcgattgaggaaatccgtgccctgagggaggctcatgcacagttccaggcttctttgtcgtctgcacaggctgattttgaagccctggcagcccttgatcgccaaatcaagacgttcaatgttggccgaatccttacacctggttcaccatggaggctctcgaagacacctggaggaacttgcagaagataattgctgaacgtgatactgaacttgctaaagaagctcaacgacaagacgaaaatgataaattgaggaaagagtttgcaggacccatgctttcataatggtgccgagactagaactcaatgatggaaggtccggtttntcgacagaattggagnccttcnagaaggtacaaagttcngccaaagagtgttgagcgaatgaaaatggtntnctggagacttnttgnacaattcnacttc

SEQ ID NO: 1567 - DNA, 648 bp, Ctenocephalides felis
  misc_feature (105)..(105): n = unknown
  misc_feature (202)..(202): n = unknown
  misc_feature (414)..(414): n = unknown
  misc_feature (484)..(484): n = unknown
  misc_feature (559)..(559): n = unknown
  misc_feature (576)..(576): n = unknown
  misc_feature (585)..(585): n = unknown
  misc_feature (612)..(612): n = unknown
  misc_feature (637)..(637): n = unknown
  misc_feature (648)..(648): n = unknown
atttttttcatagttatgcatcctttatcattaggattaatactaattatccaaacaatttgaacaagaatatttattggtttaatttcaaaaacattctgattntcatatattttatttatttcatttattggaggaatattaattctatttatttatataacaagaattccaaatactgaatatttttctttaaatattnataaaactatttttattattttattattaacattaagaattattatttattataataaaaattttctattaatttttaacaataattccatatttaatgattttaattcaaacttacttatatataattttaatctaaataaattatataattttccaaataatttattaactattatattaattatttatttattaatttcattaatttgngaggtaaaattcagatattttttatggcctttacgaaaaaattttaaaaaaaaaaaaaaaaaaaaatcgngggggggccgggcccaatcgcctaaggggtcggttcaatcctgggcgggttacacgcggctgggaacccgggttnccacttatcggctgggncatcccttngcagtgggtatagcgaaggcccccgcnccttcaaagtgccgctgatggaagnaatggagcgtn

SEQ ID NO: 1568 - DNA, 661 bp, Ctenocephalides felis
  misc_feature (5)..(5): n = unknown
  misc_feature (473)..(473): n = unknown
  misc_feature (544)..(544): n = unknown
  misc_feature (601)..(601): n = unknown
  misc_feature (604)..(604): n = unknown
  misc_feature (611)..(611): n = unknown
  misc_feature (645)..(645): n = unknown
  misc_feature (661)..(661): n = unknown
caggnttccacaacttgtcattaatatctcggtctcttcactgagacggtaaaagaatttcaaaatgggttacttttattgtatatcacttttatgcctgttcactatagttagctgtaataccggattagatcctaaaggtccaaaagttactcatgaggtatactttgacatcagcattggtggtgaacctgcaggcccgtgttttgatcggccttttcgggggcactgtacccaaaacagttgaaaatttcgtagaattgtccaagaaacctaaaggtgaaggatacaaaggcagtaaattccacagggtcatcaaggacttcatgattcaaggtggtgacttcaccaggggagatggaactggaggccgtcaatttatggagaacgttttgctgatgaaaactttaagttgaagcattatggtgctggatggttgccatggcaaatgctggcaaagacctatggatctnaatttttatcctacaaaccctgctggtagatgacgtccgttgattcggaaagtatcaaggaatggatgtgngaggaaatgatcacatcacagattcaaaacaaccccactgtgtgaatttagacttgngtnactgttntaacctcgggggtaagaatcactaataaagattntctttgtatttttatn

SEQ ID NO: 1569 - DNA, 941 bp, Ctenocephalides felis
  misc_feature (4)..(4): n = unknown
  misc_feature (454)..(454): n = unknown
  misc_feature (471)..(471): n = unknown
  misc_feature (547)..(547): n = unknown
  misc_feature (575)..(575): n = unknown
  misc_feature (628)..(628): n = unknown
  misc_feature (653)..(653): n = unknown
  misc_feature (677)..(677): n = unknown
  misc_feature (682)..(682): n = unknown
  misc_feature (689)..(689): n = unknown
  misc_feature (693)..(693): n = unknown
  misc_feature (699)..(699): n = unknown
  misc_feature (727)..(728): n = unknown
  misc_feature (730)..(730): n = unknown
  misc_feature (738)..(738): n = unknown
  misc_feature (753)..(753): n = unknown
  misc_feature (763)..(763): n = unknown
  misc_feature (778)..(778): n = unknown
  misc_feature (788)..(789): n = unknown
  misc_feature (795)..(795): n = unknown
  misc_feature (807)..(807): n = unknown
  misc_feature (817)..(818): n = unknown
  misc_feature (825)..(825): n = unknown
  misc_feature (853)..(853): n = unknown
  misc_feature (869)..(869): n = unknown
  misc_feature (901)..(901): n = unknown
  misc_feature (912)..(912): n = unknown
  misc_feature (914)..(914): n = unknown
  misc_feature (916)..(916): n = unknown
  misc_feature (928)..(928): n = unknown
  misc_feature (930)..(930): n = unknown
  misc_feature (935)..(935): n = unknown
  misc_feature (939)..(939): n = unknown
gtcntttgcgttgaaagctgaaacatttctatttttatctcgaattgcacaagcatttatttagtaactttaattagtgtacagtattagcaaacaaaatatgatgaacattcaaaaaattgttaggagcttaaaccgaggtggagttgcaagaatgtcaactggacagtacggtgatggtgctggcaaaggaggtggtggtggtggatccatccgtgaagcaggtggatctttcggcagaatggaagctgctagagaagaagaattcttttataaacagcaacaagcccaattgaagaaacttaaggaacaagcaatagatcagaaaactttccatgaggaacaattaaaacttcacaaggaggctttggagagacatgaaaaacatttggctgagcttaagaagtaaattgaagtttcatatatagcattatgaaaatgttagacagtgatnaaaattcaaatatttgntctattactgaattaataaacttgcattaagcttctataagttattagttttctagcatcttaatatactcattgncactacatatagttttaaattcattggngctatgcatgtattggactaaatattggaaataatccataacaatttttttgngaaaaaaaaaaaaaaaaaactcggnggggggggcccggaccccaattcnccctntaggggngtcnattacnaatcactgggccgcggttttacaacgtnngngactgggnaaaccctgggggtancccaacttantcccttggaaaacantccccttttnncaagtnggggtaaaaccnaaaaggcccnncccattnccctttccaacaatttgcccccctgaantggggaatggcaattngaacctttttttttttgtaaaattccgttaanttttgtaaaancntnttttttaaccanangcccnaaangg

SEQ ID NO: 1570 - DNA, 931 bp, Ctenocephalides felis
  misc_feature (589)..(589): n = unknown
  misc_feature (646)..(646): n = unknown
  misc_feature (737)..(737): n = unknown
  misc_feature (751)..(751): n = unknown
  misc_feature (762)..(762): n = unknown
  misc_feature (770)..(770): n = unknown
  misc_feature (772)..(772): n = unknown
  misc_feature (782)..(782): n = unknown
  misc_feature (803)..(816): n = unknown
  misc_feature (849)..(849): n = unknown
  misc_feature (852)..(852): n = unknown
  misc_feature (855)..(855): n = unknown
  misc_feature (857)..(857): n = unknown
  misc_feature (860)..(860): n = unknown
  misc_feature (864)..(865): n = unknown
  misc_feature (886)..(886): n = unknown
  misc_feature (892)..(892): n = unknown
  misc_feature (898)..(898): n = unknown
  misc_feature (926)..(926): n = unknown
  misc_feature (931)..(931): n = unknown
aagatttagacctagacgatgtaatcctcataggaaagacacaaacacaatacattttaataatttacatcgaaaaagtaagttttatagaacggccgcttacactttacacaaccaaaattaatctgctgaagaattttacgaagactaattagttttaaatctacagtatggatgtgttgaataggcccgctcacgaatttggaaatgatgaaacagttgaaactttatgggctatgaaagccatggatcatgttattgtctattttaatgtacatttattaaaatatttatcttcaacttataggcaatattcagtacagacgtgccttatttcagatactttgctctgtagacccaaaatttctcaaaatgtgcccccaagatgaaattatctaccattgttttcgtcaagaatttccagatatggatgttaaagtctagatgaaaattcattaaaaggctatacaggaaaatgccgatggagagaattttgtgaacgattcaaacatatagaagattcagttttggtccttaatacgcttagattgcacattggattatagtccagaaaatactattttagttncaagagtcagtttatgccatagaatctgctcgaaataaagaaggccttaatgactgnatcagaaaaaaatatgctaatgtaagtgatgtgcgagtaatgaaaatgtaaatccatagaaaataattagcatgggtatggttaaaaagtncatgaaaaaaaagnggggttttatntttttttntntttaataaangattttttcaaaaaaaaaaannnnnnnnnnnnnnccttgggggggggcccgggcccaattccccctntanggngnggntttnnaaatcactgggcggggttttnaacggngggaangggaaaaccctggggtacccaattaatncctgn

SEQ ID NO: 1571 - DNA, 942 bp, Ctenocephalides felis
  misc_feature (131)..(131): n = unknown
  misc_feature (528)..(528): n = unknown
  misc_feature (579)..(579): n = unknown
  misc_feature (589)..(589): n = unknown
  misc_feature (607)..(607): n = unknown
  misc_feature (642)..(642): n = unknown
  misc_feature (670)..(670): n = unknown
  misc_feature (675)..(675): n = unknown
  misc_feature (677)..(677): n = unknown
  misc_feature (707)..(707): n = unknown
  misc_feature (713)..(713): n = unknown
  misc_feature (728)..(729): n = unknown
  misc_feature (736)..(737): n = unknown
  misc_feature (740)..(740): n = unknown
  misc_feature (757)..(757): n = unknown
  misc_feature (759)..(759): n = unknown
  misc_feature (761)..(761): n = unknown
  misc_feature (768)..(768): n = unknown
  misc_feature (780)..(780): n = unknown
  misc_feature (803)..(803): n = unknown
  misc_feature (810)..(810): n = unknown
  misc_feature (827)..(827): n = unknown
  misc_feature (833)..(833): n = unknown
  misc_feature (844)..(844): n = unknown
  misc_feature (846)..(846): n = unknown
  misc_feature (848)..(848): n = unknown
  misc_feature (852)..(853): n = unknown
  misc_feature (855)..(855): n = unknown
  misc_feature (857)..(857): n = unknown
  misc_feature (859)..(859): n = unknown
  misc_feature (865)..(865): n = unknown
  misc_feature (867)..(867): n = unknown
  misc_feature (876)..(876): n = unknown
  misc_feature (881)..(881): n = unknown
  misc_feature (890)..(890): n = unknown
  misc_feature (894)..(894): n = unknown
  misc_feature (898)..(899): n = unknown
  misc_feature (902)..(902): n = unknown
  misc_feature (915)..(915): n = unknown
  misc_feature (919)..(921): n = unknown
  misc_feature (923)..(924): n = unknown
  misc_feature (936)..(936): n = unknown
  misc_feature (939)..(939): n = unknown
ttttaaaaaaaatgacgcgtataatacatacgtcagccgttttattattagcattattttacctctcgagttgcaataatgcagaggctacagaaaaacaaataccgatgacgaaaatcagtcaaaacctnggcggaccgacaatgaagttcctttactgttattcctgtggttacaggaaagtctttgaagactacatcggcatcatccaacaaaagtaccccgaaatcaggatagacggtgccaactacgaccccccaggcctgtacatgtacctagcaaagttcctaagtctagccaaaatggctttaatcatctgcgtcttgaccagagtcaatctattccgctacctcggcttagaagagcccacgtggtggacctggtgcctcgagaacaaaatgtactcctgcatgatgttcttcttcttggcaaacacgatagagggacagctggtgtcttcaggtgcgtttgagatttctttaaacgatgtccggttggtcccaagttggaaacgggaagaataccttnacccccagagttgttcagattatagataatcatatgaatatggttggctgntaaagtcgantttaaaccggagttttgngaaatgaataattatgggttaataacaccgtttgntattttgaatttttgggtaaaccaaacnaaatngnaattttttctagggttggtttccattccanggattntaaattaaaacctgnnaccttcnntantatatatatttgaagangngnttgatgnagaaattatttnattacctttaatggatatttaanaaaaaangggggtataaattttantttttntttgggaaaancnanatannanantntttatngnggggggggncccgnccccatttncctnaggnngcnatttaaatttatnggcnnngnnttaaacctgggngtnggg

SEQ ID NO: 1572 - DNA, 918 bp, Ctenocephalides felis
  misc_feature (5)..(5): n = unknown
  misc_feature (525)..(525): n = unknown
  misc_feature (566)..(566): n = unknown
  misc_feature (594)..(594): n = unknown
  misc_feature (621)..(621): n = unknown
  misc_feature (643)..(644): n = unknown
  misc_feature (651)..(651): n = unknown
  misc_feature (672)..(672): n = unknown
  misc_feature (699)..(699): n = unknown
  misc_feature (718)..(718): n = unknown
  misc_feature (723)..(723): n = unknown
  misc_feature (726)..(726): n = unknown
  misc_feature (728)..(728): n = unknown
  misc_feature (738)..(738): n = unknown
  misc_feature (745)..(745): n = unknown
  misc_feature (761)..(761): n = unknown
  misc_feature (764)..(764): n = unknown
  misc_feature (767)..(767): n = unknown
  misc_feature (775)..(775): n = unknown
  misc_feature (784)..(784): n = unknown
  misc_feature (798)..(798): n = unknown
  misc_feature (801)..(801): n = unknown
  misc_feature (811)..(811): n = unknown
  misc_feature (823)..(823): n = unknown
  misc_feature (832)..(832): n = unknown
  misc_feature (850)..(850): n = unknown
  misc_feature (892)..(892): n = unknown
  misc_feature (895)..(895): n = unknown
  misc_feature (899)..(899): n = unknown
  misc_feature (903)..(903): n = unknown
  misc_feature (911)..(911): n = unknown
  misc_feature (915)..(915): n = unknown
  misc_feature (918)..(918): n = unknown
atgtnttcgggcatttagtgttttgaagtatcgtggcataaagcagatttaagttaatctgcttcattcaatacacaacatggtagggaaacccaacaagatgtatgtttttaagcgagatggccgcaaggaagaaattcattttgataaaatcacttcaaggattcaaaagctatgttacggattgaacatggattttgtagaccctgtctcaataacattaaaagtcataaatggattatatactggagttacaactcaagaacttgataatctggccgcagaaactgctgctaccatgacaacaaatcatgctgattatgccgttcttgcagcacgaatagctgtttcaaacttgcacaaagaaacaaagaaacaattttcagatgtcatggatgatttgtcaatatgactaatgagtatactaaaaagagatcaccaatgatagcagattatcatcataaaataataatggataatgcagatcgcattaactctgctattatttatgatagagaattcagntacaattactttgggttcagacattggagcgtcttatttantaaaaattatgggaaaagtagttggacnaccccacatatgctaatgcggtagctntttggaatcattggggaaaacnntggtgcngcaattgatccctttacttantttctggaaaaaattttactcatgccnagccacattttttgttgtnccccnccnanctcaattatnaagtggnttttcttgctttccanaanaangttttgangggttttgntctttaaaccaagnggntttttattcnaaaatggggggngggtttggngacccctttttggttttngggaaaaaccttctttgggggacccaagggatttttaagggnttngtcnttcnccggtttnaaanaan

SEQ ID NO: 1573 - DNA, 922 bp, Ctenocephalides felis
  misc_feature (531)..(531): n = unknown
  misc_feature (589)..(589): n = unknown
  misc_feature (611)..(611): n = unknown
  misc_feature (654)..(654): n = unknown
  misc_feature (671)..(671): n = unknown
  misc_feature (694)..(694): n = unknown
  misc_feature (707)..(707): n = unknown
  misc_feature (720)..(720): n = unknown
  misc_feature (732)..(732): n = unknown
  misc_feature (756)..(756): n = unknown
  misc_feature (779)..(779): n = unknown
  misc_feature (783)..(783): n = unknown
  misc_feature (788)..(789): n = unknown
  misc_feature (794)..(794): n = unknown
  misc_feature (804)..(804): n = unknown
  misc_feature (815)..(815): n = unknown
  misc_feature (845)..(845): n = unknown
  misc_feature (856)..(856): n = unknown
  misc_feature (867)..(867): n = unknown
  misc_feature (869)..(869): n = unknown
  misc_feature (874)..(874): n = unknown
  misc_feature (883)..(883): n = unknown
  misc_feature (889)..(889): n = unknown
  misc_feature (899)..(899): n = unknown
  misc_feature (917)..(917): n = unknown
  misc_feature (920)..(920): n = unknown
ttatttgtgaaataaatttattataaaatgttagatctatttacaatatttagtaaagggggcatagtgctctggtgctttcagagcactagccacatatttgcaccatctgtaaatgcacttattagaagtgtcatattgcaggagcgatctggaaaaaatacctacgaccacgattccttaacattgcaatataaattagacaatgaatttgagctggtgtttgtggttgcctttcagaaaattttgcaactgtcatacgttgataaatttttaaatgatgtacatttagagtttagagataagtataagaatgacttacaaaataaaaggtattttcaagaatttgactttggtgcttgttataacagtattctgcgggcggctgaagaatggggtcggactcaggctaagttacctaaacaaatgcgttcttttgaagattctatgaaatctaaaaagacagttgcttcaatgattgaaagaaagggcgagggaaaaaaagaccccagaagaatggtaaacaaaaangcaaaaatggttggtttgatgaagaaaaaattaatacttaaactggtattggacccgngccaaccaataattccaaaagnggtgatccaatgattaatcatgccaaatcgatgggaacttgcncaaaaaatgggggcctnttaaaaaaaaaaaaaaaacttgngggggggcccggncccaattcccctntagggaggcgantacaaataactggccgcggtttanacgcgggaatgggaaaacctggngttncccanntaatngcttggaganattcccttttncaagtggggtaaaaacaaaaggccccaccnatgccctttcnaaaattggccncntgaangggaaaggnaaaatntaacggtaanttttttaaaaatccggtnaantt

SEQ ID NO: 1574 - DNA, 943 bp, Ctenocephalides felis
  misc_feature (6)..(6): n = unknown
  misc_feature (597)..(597): n = unknown
  misc_feature (633)..(633): n = unknown
  misc_feature (646)..(646): n = unknown
  misc_feature (670)..(670): n = unknown
  misc_feature (675)..(675): n = unknown
  misc_feature (694)..(694): n = unknown
  misc_feature (738)..(738): n = unknown
  misc_feature (751)..(751): n = unknown
  misc_feature (774)..(774): n = unknown
  misc_feature (791)..(791): n = unknown
  misc_feature (800)..(800): n = unknown
  misc_feature (803)..(803): n = unknown
  misc_feature (814)..(814): n = unknown
  misc_feature (852)..(852): n = unknown
  misc_feature (866)..(866): n = unknown
  misc_feature (898)..(898): n = unknown
  misc_feature (907)..(907): n = unknown
  misc_feature (912)..(912): n = unknown
  misc_feature (936)..(936): n = unknown
  misc_feature (942)..(942): n = unknown
attgtntgttatttagtttttaatgtcatcgcaaaatgatgattcaacgcggtctgccgctgcaaacaatgtggagcctaatgaaacagatgggttgtcttcagagcgcccagaacaaggtcaatctgagagtagtatatcaaacttgatgaaacattttgctaacaaattaggtttaaatgaaaaagatgaaagtgatgaagatgaaccacaggttttatcagaagttacaattgagggtgtggttgaatatattaaaagtggaaaatgtaaaaatataataacaatggttggagcaggaatttctacgtcagccggtataccagattttcgatcaccaaactctggcctttatgataatttacaaaagtataacctgcctgatccacaagctatttttgatattgattactttagtgaaaatcccaagccatttttttccttagcaaaagagttataccctggtaattttcggcctacaatttgccattattttattaaactattgaatgaaaagaaattggtattaagacattatactcagaatatagatactttggagagagtatctggattagatgaagataaatggtagangctcatggttcatctacaaatcacatgtatcggtgnaggaaagaatatnccctgggtggatgaaaaaaaaatnttttntgatgagaattccacttgnacatgccggagaaagtggtcaagcctggatataccgtctttggngaaaatttgccanaaaggttcattggctaataaaanaagacttcacccaaagngccttggtnaanaatcatggganccgctttggtggtcaaacctttgcttccttggatggantgggattcggaacntggcctaaacttttgattaaattaaaaaaaanggggggaanggggntaaaaggttccaatggtaggtttnttaaang

SEQ ID NO: 1575 - DNA, 931 bp, Ctenocephalides felis
  misc_feature (388)..(389): n = unknown
  misc_feature (393)..(393): n = unknown
  misc_feature (417)..(417): n = unknown
  misc_feature (426)..(426): n = unknown
  misc_feature (434)..(434): n = unknown
  misc_feature (509)..(509): n = unknown
  misc_feature (520)..(520): n = unknown
  misc_feature (530)..(530): n = unknown
  misc_feature (549)..(549): n = unknown
  misc_feature (577)..(577): n = unknown
  misc_feature (591)..(591): n = unknown
  misc_feature (619)..(619): n = unknown
  misc_feature (622)..(622): n = unknown
  misc_feature (630)..(630): n = unknown
  misc_feature (634)..(634): n = unknown
  misc_feature (644)..(644): n = unknown
  misc_feature (654)..(654): n = unknown
  misc_feature (669)..(669): n = unknown
  misc_feature (674)..(674): n = unknown
  misc_feature (678)..(678): n = unknown
  misc_feature (699)..(699): n = unknown
  misc_feature (704)..(704): n = unknown
  misc_feature (710)..(710): n = unknown
  misc_feature (729)..(729): n = unknown
  misc_feature (738)..(738): n = unknown
  misc_feature (743)..(743): n = unknown
  misc_feature (747)..(747): n = unknown
  misc_feature (752)..(752): n = unknown
  misc_feature (761)..(761): n = unknown
  misc_feature (770)..(770): n = unknown
  misc_feature (779)..(779): n = unknown
  misc_feature (787)..(787): n = unknown
  misc_feature (801)..(801): n = unknown
  misc_feature (804)..(804): n = unknown
  misc_feature (808)..(808): n = unknown
  misc_feature (819)..(819): n = unknown
  misc_feature (823)..(823): n = unknown
  misc_feature (825)..(825): n = unknown
  misc_feature (834)..(834): n = unknown
  misc_feature (843)..(843): n = unknown
  misc_feature (847)..(847): n = unknown
  misc_feature (849)..(849): n = unknown
  misc_feature (857)..(857): n = unknown
  misc_feature (861)..(861): n = unknown
  misc_feature (872)..(872): n = unknown
  misc_feature (874)..(874): n = unknown
  misc_feature (880)..(880): n = unknown
  misc_feature (884)..(884): n = unknown
  misc_feature (902)..(902): n = unknown
  misc_feature (906)..(906): n = unknown
  misc_feature (921)..(921): n = unknown
ccgacgttctaagcacggtcggggacatgtgaaccctgtaagatgcacaaattgtgctcgatgtgtccctaaagacaaggctatcaagaagttcgtcattaggaacatcgtcgaagcagctgctgtacgtgatatcacggaggcttctgtttattccgcttacgtcttacctaagttgtacgctaagttacactactgcgtttcctgcgctattcactctaaggtagttcgcaatcgctctaaggaagatcgtcgcattaggactccaccagtgagatcattcccaagagataatcaaaggcaacaaaatgctccaagaaagtaaatgttcatattttaaataaaaaaaacgacaacttaaaaaaaaaaaaaaaaaaaaaaaaaaaanncctngggggggggcccggccccaattcnccctatagngagtcgtnttacaattcactggccgccgttttacaacgtcgggactgggaaaaccctggcgttacccaacttaatcgccttgnagcacatcccntttcgccagntggcgtatagcgaaaaggnccgcccgatcgcccttccaacagttgcncagccttgaatggngaatggcaaattggaagcgttatatttngtnaaaaatcncgtnaaattttgtnaaacaacttntttttttaaccaatnggccngaantcgggaaaatccttttaaatnaaaanaaaaanccggatagggttggggttnttccctttnggaanaaanttccntttttaaanaacgggggnctccacctnaaaggggnaaaaccttttttanggngaangcccctcgggnaccntncccctaatnaattttttngggncnggggcccnaaanccttaaatggnancctaangggnccccctttaaaatttgcngggnaaacccgcaaccggngaaaaaagga

SEQ ID NO: 1576 - DNA, 907 bp, Ctenocephalides felis
  misc_feature (5)..(5): n = unknown
  misc_feature (580)..(580): n = unknown
  misc_feature (647)..(647): n = unknown
  misc_feature (660)..(660): n = unknown
  misc_feature (671)..(671): n = unknown
  misc_feature (710)..(710): n = unknown
  misc_feature (715)..(716): n = unknown
  misc_feature (727)..(727): n = unknown
  misc_feature (739)..(739): n = unknown
  misc_feature (773)..(773): n = unknown
  misc_feature (782)..(782): n = unknown
  misc_feature (795)..(795): n = unknown
  misc_feature (804)..(804): n = unknown
  misc_feature (830)..(830): n = unknown
  misc_feature (844)..(844): n = unknown
  misc_feature (853)..(853): n = unknown
  misc_feature (870)..(870): n = unknown
  misc_feature (872)..(872): n = unknown
  misc_feature (877)..(877): n = unknown
  misc_feature (880)..(880): n = unknown
  misc_feature (886)..(886): n = unknown
  misc_feature (888)..(888): n = unknown
  misc_feature (896)..(896): n = unknown
  misc_feature (899)..(899): n = unknown
attgnttaaattaaactgttgtcatttaagctttaaattacacactgacaacggagaagtacagtttatttcgcaatcgttatgttaacgttttctcttacatgtatgaaagttatttagttataattaaaaatggctctgcaaagcttgaaaggtttttctaaattgttaaacaaatgttcgaatcgtgtttcatatttaactgtaagatgtgcatctcaatattatgacatagatgataacatatttggattaaatgaggatcaggttcagttgaggaagaccattttcgattttgcccagaaagaattagcacctaaagcagctgaaattgataaaaataatacctttaaagaactgagagagttctggagaaaattaggagacttgggaacattaggaataactgctccagcagaatacggtggaacagaaggcacatatttagatcatgttattattatggaagaattatcaagagcttcgggagctattgccctctcatatggagctcattctaatctagcaataaatcaaattcgaaggaatggaactgatgagcaaaaagcgaaatatttgnctaactttggtctggtgaacatatcgggctctagcatgtctgacctggtctggacagactagttctntgaactaagagcngagaggaaggngattttttgtttcaagggaataatttgggatactaaggnccaannctgaacttaanggttatgccctnccatccaatgtaaagcctcacatggaattccgcntttttgganaaaaaggtttganggattaatnctggccaaaattggttaacttggaanggaggtcaattccngtgacctgntttcaaaactgaaggtncnccccnaantttttngngaaaaggnaangggttttt

SEQ ID NO: 1577 - DNA, 917 bp, Ctenocephalides felis
  misc_feature (635)..(635): n = unknown
  misc_feature (648)..(648): n = unknown
  misc_feature (657)..(657): n = unknown
  misc_feature (710)..(712): n = unknown
  misc_feature (724)..(724): n = unknown
  misc_feature (735)..(735): n = unknown
  misc_feature (741)..(741): n = unknown
  misc_feature (750)..(751): n = unknown
  misc_feature (753)..(753): n = unknown
  misc_feature (770)..(770): n = unknown
  misc_feature (773)..(773): n = unknown
  misc_feature (784)..(784): n = unknown
  misc_feature (790)..(790): n = unknown
  misc_feature (800)..(800): n = unknown
  misc_feature (813)..(813): n = unknown
  misc_feature (831)..(831): n = unknown
  misc_feature (837)..(837): n = unknown
  misc_feature (840)..(840): n = unknown
  misc_feature (843)..(843): n = unknown
  misc_feature (849)..(849): n = unknown
  misc_feature (854)..(854): n = unknown
  misc_feature (865)..(865): n = unknown
  misc_feature (888)..(888): n = unknown
  misc_feature (891)..(891): n = unknown
  misc_feature (898)..(898): n = unknown
  misc_feature (901)..(901): n = unknown
  misc_feature (916)..(916): n = unknown
tttattgcatcaggcgacaaccatcttttcatagtgacagagttcatggaaaacggttccttgagaagctttctacacaaaaatagaaacagattgaccaaaaccgatcttttagacttctccaaacaggttgcaagtggtatgaagtttttggaagagcgtatgtatgtccatcgagatttggctgccaggaatattctggtggacaagaaattcggtgccaagatttgcgattttgggctcagcaggattataaaggacgatatgtacaaatcgactggttcagcatttgctgtcaagtgggctgctcccgaatctatagagtataggaattttacgtccaaatcggacgtttggagttttggaattgttttgtatgaaatctatacgctgggcaaggaaccttacccggaattgcagaagaacggcgaacttatagacatgctgagaaatggttccggatgcggaaaccggaattggccggagttgaaatttacgaactcatgaccgatgttgggaattcgccaagaatccagcccgacttttgccgaagtctacgaactgatcaacgaagttacgaaagtcgattatccgaagccgaagtcgtcgaagaactaaattaatgaatagttgcnagttttggccatntcttacctntaaaaactaattattttttattttagtttggaaaaaaaaaaaaaaaaaaactnnngggggggcccgnacccaattccnccttanggggccgtnntncattccctggccggtgnttnaaacgtcgggnttgggnaaaacctggngttcccaacttantcgcttggagaaatcccnttttgncanttngggtanaaacnaaaaggccccnccgtcccttcccaaatttggccnctnaatgggnaangcaaattgtaccttnt

SEQ ID NO: 1578 - DNA, 939 bp, Ctenocephalides felis
  misc_feature (676)..(676): n = unknown
  misc_feature (761)..(761): n = unknown
  misc_feature (783)..(783): n = unknown
  misc_feature (793)..(793): n = unknown
  misc_feature (796)..(796): n = unknown
  misc_feature (800)..(800): n = unknown
  misc_feature (822)..(822): n = unknown
  misc_feature (838)..(838): n = unknown
  misc_feature (862)..(862): n = unknown
  misc_feature (879)..(879): n = unknown
  misc_feature (893)..(893): n = unknown
  misc_feature (902)..(902): n = unknown
  misc_feature (914)..(914): n = unknown
  misc_feature (919)..(937): n = unknown
  misc_feature (939)..(939): n = unknown
ttttaacgctcttataaaagaaattgttaaatctattgaaatccttattcatcggtgcctattttcggcttaaagatggttcaaaagaagcctaagaagaaggtcggaaagaaagtggcagccgcccctttggctgtgaagaagtctgaacccaaaaagttggttaatcctttgttcgagaagaggacaaggaactttggaatcggtcaggatatccagccaaccagagacttatccagatgcgtgagatggcccaaatacatcagaatccaacgccaaaagagcgttttgcagaagcgtttgaaggtccctccaccaatcaaccagttcacgcagactttggacaaacaaacagctacacagttgttcaagattttagaaaagtacaggccggagactgctattgctaaaaaggcacgtttgcaagcacgtgctgaagctaaagcccaagggaaggaagacacacctacaaaacgtccaaatgttgtacgttctggcacaaacactgtcacaaaacttgttgaacaaaagaaggccacttgttgtgattgcccatgatgtggacccccttgagttggtgttgttcatgccagccctatgccgcaaaatgggtggtccctactgcatagtgaaaggcaaggttcgtcttggagcctggtccgcaggaagacatgcncatgtgtagcactaaccaatgttgacctggcgacaggagtgggtttgaataagttggttgaggccgcaagaccacttcaccgatnggcccgatgagatcaaaaggcnttggggcggnggnggtntgggatctaaaacccttgccanaattgccaagttgganaaaatcaaggcccgggaaatggcncaaaaaccgggttgatnaatattgattgganaaataaagnttttttggtggnaaaannnnnnnnnnnnnnnnnnncn

SEQ ID NO: 1579 - DNA, 919 bp, Ctenocephalides felis
  misc_feature (3)..(3): n = unknown
  misc_feature (553)..(553): n = unknown
  misc_feature (615)..(615): n = unknown
  misc_feature (663)..(663): n = unknown
  misc_feature (677)..(677): n = unknown
  misc_feature (696)..(696): n = unknown
  misc_feature (705)..(705): n = unknown
  misc_feature (721)..(721): n = unknown
  misc_feature (732)..(732): n = unknown
  misc_feature (750)..(750): n = unknown
  misc_feature (769)..(769): n = unknown
  misc_feature (774)..(774): n = unknown
  misc_feature (777)..(777): n = unknown
  misc_feature (779)..(780): n = unknown
  misc_feature (782)..(786): n = unknown
  misc_feature (788)..(793): n = unknown
  misc_feature (795)..(796): n = unknown
  misc_feature (798)..(799): n = unknown
  misc_feature (818)..(818): n = unknown
  misc_feature (826)..(826): n = unknown
  misc_feature (831)..(831): n = unknown
  misc_feature (834)..(834): n = unknown
  misc_feature (840)..(840): n = unknown
  misc_feature (847)..(847): n = unknown
  misc_feature (849)..(850): n = unknown
  misc_feature (852)..(852): n = unknown
  misc_feature (863)..(864): n = unknown
  misc_feature (873)..(874): n = unknown
  misc_feature (878)..(878): n = unknown
  misc_feature (884)..(884): n = unknown
  misc_feature (887)..(887): n = unknown
  misc_feature (900)..(901): n = unknown
atntttattgcatttgttgcgctcttcactctgcccaaagtttatgaaactaacaaaacacaaatcgatgccaatctcgatgtcgttcgaagcaagttacaagaaattacttccaaggtaaaagcagctgtaccaattggaaagaaagctgaaagtgataaagataaataagcacaaaaaattatatttatataataatgtggatatttaattgtatagcgatatacataactcttcaaacataaccacaccctttttaacaataattaaatcaactaaatatgaaatatatattatatatgttcgattgtttggacatatcgaaagctatatgtgaatattgcaaatcgaattgatttgtagtatatatggaatcaattttttttcatgatgaaccaattcgatagatttatagaaagcctttttattttaaatatttacatttgacactaaaaataggtatcttataaaaaaatttcatttaatacatataatatgtctcatatataatatttattatacattcttttaaagaaatatgttaaaggtttgnaaaatattactttttagtattaggttctattcaaaaattggttgggtggaattatttttggnattggcggtaaattttatttttaaataatatgcaattctcatccttgnctttaagaataatnttttaaatatggattggtnaaaagtaangtatgaattttacttntcgcatcaatncaggtatcattaaatttnttttaggagtttaaaaaanaaaangcncnngnnnnngnnnnnngnntnncctggggggggggcccggncccaattnccctnagngggggnggttaananncnggccgggtttnnaacgggggnngggnaaaccnggnttccccaattaanngctgtggaaaaaccccct

SEQ ID NO: 1580 - DNA, 935 bp, Ctenocephalides felis
  misc_feature (5)..(5): n = unknown
  misc_feature (25)..(25): n = unknown
  misc_feature (33)..(34): n = unknown
  misc_feature (54)..(54): n = unknown
  misc_feature (449)..(449): n = unknown
  misc_feature (461)..(461): n = unknown
  misc_feature (568)..(568): n = unknown
  misc_feature (570)..(570): n = unknown
  misc_feature (613)..(613): n = unknown
  misc_feature (615)..(615): n = unknown
  misc_feature (646)..(646): n = unknown
  misc_feature (662)..(662): n = unknown
  misc_feature (666)..(666): n = unknown
  misc_feature (683)..(683): n = unknown
  misc_feature (687)..(687): n = unknown
  misc_feature (689)..(689): n = unknown
  misc_feature (700)..(701): n = unknown
  misc_feature (708)..(708): n = unknown
  misc_feature (711)..(711): n = unknown
  misc_feature (715)..(715): n = unknown
  misc_feature (721)..(721): n = unknown
  misc_feature (736)..(736): n = unknown
  misc_feature (738)..(738): n = unknown
  misc_feature (747)..(747): n = unknown
  misc_feature (756)..(756): n = unknown
  misc_feature (759)..(759): n = unknown
  misc_feature (763)..(763): n = unknown
  misc_feature (785)..(785): n = unknown
  misc_feature (790)..(790): n = unknown
  misc_feature (804)..(804): n = unknown
  misc_feature (810)..(810): n = unknown
  misc_feature (812)..(812): n = unknown
  misc_feature (819)..(819): n = unknown
  misc_feature (829)..(829): n = unknown
  misc_feature (840)..(840): n = unknown
  misc_feature (842)..(842): n = unknown
  misc_feature (852)..(852): n = unknown
  misc_feature (854)..(854): n = unknown
  misc_feature (856)..(857): n = unknown
  misc_feature (866)..(866): n = unknown
  misc_feature (873)..(874): n = unknown
  misc_feature (876)..(876): n = unknown
  misc_feature (878)..(878): n = unknown
  misc_feature (896)..(896): n = unknown
  misc_feature (899)..(899): n = unknown
  misc_feature (903)..(903): n = unknown
  misc_feature (908)..(909): n = unknown
  misc_feature (912)..(913): n = unknown
  misc_feature (917)..(917): n = unknown
  misc_feature (932)..(932): n = unknown
ctttnctagttattaagataacatnattaaaannacttattaacaataatgtcngctaatttaaaaaccatatacgcttttgcgcgagagatgcattccaaaaatataaataaacctatacaatatggtacagctggatttcggaccaaagctacagacttggactatgtcatgtttcgtatgggggttcttgcagctcttcgttcccgtgttaaaagcacagcagtaattggattaatgataactgcatcacataatcctgaagaagataatggtataaaactcgtagacccccatggtgagatgcttgaacaaagttgggaagagttagcaaccactttagttaacgttagtgattctgagttagaggctacagttgaaaaaattgtaaaagacttgaatatcgatcttaatttgaaggctaatgtgtttattggtatggatacaangtatagtacgtncccagtctttgcaaagctgctgttgatggagtattatctatttcgggggatctcccagagaattttggtattggtaccgactcccaatgcttcactattttgttttntntgcaaacctgatcaagcctattgggaaaacctactggaagaangnttttatacccaattggataacttgcttcaanaaccccttcgggcgangttncatttcaatgggaaagnattncnccaaaattttnntttgatnggngccnatggantggggggcaaaaaangnttcaatttnaaaaagacnggnggangtttgatttgttttttaacaancggcnaaggaaaataaatnttaggngnggggctntttttggaangacaccattcncnccccaaggantncnnttaaaaaanttttcanngngntttttgttgaaacccaancgnatgnttccnnttnngganaaaaaaaggttttantgc

SEQ ID NO: 1581 - DNA, 920 bp, Ctenocephalides felis
  misc_feature (4)..(4): n = unknown
  misc_feature (33)..(33): n = unknown
  misc_feature (498)..(498): n = unknown
  misc_feature (540)..(540): n = unknown
  misc_feature (556)..(556): n = unknown
  misc_feature (598)..(598): n = unknown
  misc_feature (635)..(635): n = unknown
  misc_feature (645)..(645): n = unknown
  misc_feature (652)..(652): n = unknown
  misc_feature (659)..(659): n = unknown
  misc_feature (680)..(680): n = unknown
  misc_feature (687)..(687): n = unknown
  misc_feature (696)..(697): n = unknown
  misc_feature (704)..(704): n = unknown
  misc_feature (707)..(707): n = unknown
  misc_feature (735)..(735): n = unknown
  misc_feature (741)..(741): n = unknown
  misc_feature (744)..(744): n = unknown
  misc_feature (760)..(760): n = unknown
  misc_feature (770)..(770): n = unknown
  misc_feature (782)..(783): n = unknown
  misc_feature (788)..(788): n = unknown
  misc_feature (794)..(794): n = unknown
  misc_feature (799)..(799): n = unknown
  misc_feature (805)..(805): n = unknown
  misc_feature (816)..(816): n = unknown
  misc_feature (823)..(823): n = unknown
  misc_feature (827)..(827): n = unknown
  misc_feature (856)..(856): n = unknown
  misc_feature (863)..(864): n = unknown
  misc_feature (878)..(878): n = unknown
  misc_feature (891)..(891): n = unknown
  misc_feature (903)..(903): n = unknown
  misc_feature (915)..(915): n = unknown
  misc_feature (920)..(920): n = unknown
tttnatagtgatgcatcctttatcattaggagntaatactaattatccaaacaatttgaacaagaatatttattggtttaatttcaaaaacattttgattttcatatattttatttatttcatttattggaggaatattaattctatttatttatataacaagaatttcaaatactgaatatttttctttaaatatttataaaactatttttattattttattattaacattaagaattattatttattataataaaaattttctattaatttttaacaataattccatatttaatgattttaattcaaacttacttatatataattttaatctaaataaattatataattttccaaataatttattaactattatattaattatttatttattaatttcattaatttgtgtagttaaaattacagatattttttatggtcctttacgaaaaaatttttaaaaaaaaaaaaaaaaaaaactcgagggggggccccggncccaatcgccctatagtgagtcgtattacaatccctggccgncggtttacacggccgngactgggaaaaccctggcgttacccaacctaatccgccttgncagcacatcccctttcgcagctggcgtaatagcgaanaaggcccgcnccgtcgnccttccnacaagttggcgccaccggaanggggaanggcaaatgnnagcgttnatnttttggtaaaatccggggtaaaatttgntaaaancgnccatttttaaccaatnggccggaatngggaaacccttnntaatncaaagnattgnccgggntggggtggggngtggtcngttnggaacaaagtcccttttaaggaacggggncccccgnnaagggcaaaaaccngttttaggggggnggcccctccggnaccccccctaanaggtn

SEQ ID NO: 1582 - DNA, 904 bp, Ctenocephalides felis
  misc_feature (676)..(676): n = unknown
  misc_feature (696)..(696): n = unknown
  misc_feature (723)..(723): n = unknown
  misc_feature (727)..(727): n = unknown
  misc_feature (732)..(732): n = unknown
  misc_feature (751)..(751): n = unknown
  misc_feature (800)..(800): n = unknown
  misc_feature (804)..(804): n = unknown
  misc_feature (823)..(823): n = unknown
  misc_feature (841)..(841): n = unknown
  misc_feature (854)..(854): n = unknown
  misc_feature (885)..(885): n = unknown
  misc_feature (892)..(892): n = unknown
  misc_feature (896)..(896): n = unknown
  misc_feature (899)..(899): n = unknown
  misc_feature (903)..(903): n = unknown
acagatacgtagctgttaaatgtcattgcgttgctatttttgattatttcatcagtatttcaataaatccaacatatgtctcggcacacatcattataattaaattattagtttcatttccattaatttattttactggcgtcaatatgacggtatcaaacgacgaattagttgaatcttttaaagctttaggtttaagtgaacaaaaggcgaaagaaacgttaaaaaatacagttgttacgaaaaatttaacattagcattacatgaggtgaggggcattattttgccccaaggagctggttctttaatctattatgtggcaacaaaaatcaaaccacagattatagatcaattgcctgtacttgtaaaatatatatcaacatcaaaattagacacaacagttagagttgatgcggccttgcaatttatgttgtctcatttaaatggatatcaaatcgatgaatttgagaaggcttgtggaattggtgttgttgtacacctgaacaaattgaaaaagcagtaaatgaggctatgttggaacataaagaggcaattcttgagaaacgatacagatacaacactggtcctttgatgcaaagtgtaagagttctttaccctgggcagatggtcggctataaatgtgaagtggacttacaggttttgacttattggggnccaaaactggtgccgattancaccttggcaaaagtggaaagaaagtnaagntcacnccagtgcggataaaaatcngaccgaaaagaagcccgaggaagtggatcaagcagcttggggccatgtntttntgaatgatgaaaaaaaagnccttttatgcctctgggnaacctttaaaacngggggatgagtacccccctcccatgactttnaaaaacntttnaanaaang

SEQ ID NO: 1583 - DNA, 907 bp, Ctenocephalides felis
  misc_feature (5)..(5): n = unknown
  misc_feature (679)..(679): n = unknown
  misc_feature (689)..(689): n = unknown
  misc_feature (729)..(729): n = unknown
  misc_feature (769)..(769): n = unknown
  misc_feature (787)..(787): n = unknown
  misc_feature (825)..(825): n = unknown
  misc_feature (835)..(835): n = unknown
  misc_feature (840)..(840): n = unknown
  misc_feature (847)..(847): n = unknown
  misc_feature (850)..(850): n = unknown
  misc_feature (874)..(874): n = unknown
  misc_feature (898)..(898): n = unknown
  misc_feature (905)..(905): n = unknown
gggantgttaaatcgccgtaggtgctcgcatagacaaatagttcctttttataatatattgtaatgaaacatttctcactcaaaataaaaatactaagtattgctgcgtaaaaatattttataagggcggtcaaactagtctctcataatttgatttatctcagaagccaattatttcgtatatgatttggcgccaattccattccccagaccgcccgtcaaggaatacgtcagtgcacatttgctgtgtcgtatttgttgtttacttgtgttgtgtccggataaataaagtgcttgtgatttaagtaaaatggctttaaatgatgataatgaggaaaatatagaaaaaagtcataaagatttgtgtttagaattaaatatggacacgtctgcagctactgcttcgtgggattcttacaattctattagagaaaattgtcattagagggaaacccgaagcactggttatgttgctcattatatgtagcctgtcgacaagatatgactcccacagtgggtcaagtgaggccttagtagaaggaaattgtgtcagtttaactagattattgagattgtgcaatattagtctggggtgagtttttaaaaaagtaagacatgggctgaattgacaaatatgcctgaatcattatgagacgtttagatggattagaaaaagttngctgggctgngatttattcaaaagttcaagcttattcgaccactggttgngaaacccacaagaaggttgaggatcaccagtctcccaacnaacaaaaatttaaatctntcacaagatatcccagtctgtgggtcttttggtgcatnaaaggaaacnccctnccaaagngangattaattgcctggccctctttgntgggccggcttgattggtatatcnaaagccntg

SEQ ID NO: 1584 - DNA, 898 bp, Ctenocephalides felis
  misc_feature (6)..(6): n = unknown
  misc_feature (8)..(8): n = unknown
  misc_feature (563)..(563): n = unknown
  misc_feature (587)..(587): n = unknown
  misc_feature (664)..(664): n = unknown
  misc_feature (694)..(694): n = unknown
  misc_feature (775)..(775): n = unknown
  misc_feature (779)..(779): n = unknown
  misc_feature (786)..(786): n = unknown
  misc_feature (790)..(790): n = unknown
  misc_feature (797)..(797): n = unknown
  misc_feature (808)..(808): n = unknown
  misc_feature (819)..(819): n = unknown
  misc_feature (842)..(842): n = unknown
  misc_feature (854)..(854): n = unknown
  misc_feature (860)..(860): n = unknown
  misc_feature (882)..(882): n = unknown
  misc_feature (894)..(894): n = unknown
  misc_feature (898)..(898): n = unknown
gttttntnctagactgatatatgcaaaaagtgtaaaaaaatatagatgaaatgcgagagcgtgattttgcagacatgtgctgaacagtatactattgtgtttagatctagaaagtattgcgataagccaatgttactaaaaaggcaatttctttattttgaatattatcttatcgagtaggtaataacaaaataatcaacaaacgtgaattaatgaagtgataaaaaatactgacaataatagtggctcaaacggagatgcttagaagttctgtgaaaaatatgtgatcgttaatttgtgcatggacaaattttctatcaaaatgaagactaaagatatggaaatgaatttagaggaactgaaaaatgataacatcaagaaacagcaggatgaaatcaatttttcatttcgaagtattcgttatacaagatgcgacagaaaagaaaaaaaatcagtgtgcatactgaaaggagtctcgggatgctttacatcaggaaaactcgtggccatactaggtccatcaggtgcagggaaatcttctctgctcaatatactatcggggntcagagaaacaggccgtgcaaggntcaatccgtctcaatggagccaatgtgacattagataaacgggtttaggaaagcctgttggtatatacccaagatcngcatgctggccactaccaccgagagaactntctgttgcagcagactgaaatgaaacagaaatcgggtaaaactgtggagatgcatgcaaaatgcttacttaccaatgttanaccncgattantgcnttttggnggcaaaaaaanatttcaatggngtcaatggggaaaatccccaatntgttttggtgancccttnggccttgaagggttcgcctttnactaaggccctntttn

SEQ ID NO: 1585 - DNA, 912 bp, Ctenocephalides felis
  misc_feature (679)..(679): n = unknown
  misc_feature (703)..(703): n = unknown
  misc_feature (733)..(733): n = unknown
  misc_feature (786)..(786): n = unknown
  misc_feature (841)..(841): n = unknown
  misc_feature (852)..(852): n = unknown
  misc_feature (861)..(861): n = unknown
  misc_feature (876)..(876): n = unknown
  misc_feature (881)..(881): n = unknown
  misc_feature (892)..(892): n = unknown
tgatttagatgtcggcgaactgtttagcgtcaacattgtacaattacagtaaatattgtttaaaacctaatctactatcggccggaaagtcccatttaatattgactcttaatttttctactacaatgtacagaaaaggaaaatttgactttcctaagagatttacaggacaagaaaaaagtgtatgggttgagtatatagaattagctatcaaatataagccattaaatttgggacaaggttttcctgattatccttgtccagaacatgttataaaggctttggcagatgttgcaactggacccgattcattattgcatcaatatacaaggggttttggacacccaagattagtaaatgcattagccactttatatagtaaagtcttgaatagatcaattgatcctatgaaagaaatattagttacttcgggtgcttatgaagcactttactcaacaattcaaggacatatcgatagaggagatgaagctataattatagaacctttcttcgattgctatgagccaatggtaaaaggagctgaaggtgtttgcagatacattgcattaaaaccatcttctgataaatgctctgatgctcaaagttctgctggattgggttcttgataaaaaagaattggaatcattattcaatggaaaaaaccaagcttattattttnaataccctcacacccaacaggaangtattcccttggaagaacttgaatttatgntgactatgtaaaaaaggatgtctttgttatcggtgaagttatgaatggatggngttaagctcatgacctataaaatggtaccttccggatgggggaaaaactttactntggactgccgnaaaactttntggtcagggtggaantgggngggcctttggncctttggattactaaaaaaa

SEQ ID NO: 1586 - DNA, 941 bp, Ctenocephalides felis
  misc_feature (2)..(2): n = unknown
  misc_feature (720)..(720): n = unknown
  misc_feature (733)..(733): n = unknown
  misc_feature (747)..(747): n = unknown
  misc_feature (756)..(756): n = unknown
  misc_feature (760)..(760): n = unknown
  misc_feature (792)..(792): n = unknown
  misc_feature (798)..(798): n = unknown
  misc_feature (822)..(823): n = unknown
  misc_feature (827)..(828): n = unknown
  misc_feature (832)..(832): n = unknown
  misc_feature (849)..(849): n = unknown
  misc_feature (854)..(854): n = unknown
  misc_feature (881)..(881): n = unknown
  misc_feature (888)..(888): n = unknown
  misc_feature (890)..(890): n = unknown
  misc_feature (894)..(894): n = unknown
  misc_feature (896)..(896): n = unknown
  misc_feature (899)..(899): n = unknown
  misc_feature (901)..(902): n = unknown
  misc_feature (912)..(912): n = unknown
  misc_feature (918)..(918): n = unknown
  misc_feature (937)..(937): n = unknown
  misc_feature (939)..(939): n = unknown
  misc_feature (941)..(941): n = unknown
antcgggcgcggccgcggtcgcgggcgtggccgaggcagaggaagaggtcgcggccgaggttcctcaactcctgagtacaccgtgtcctccacaccacccggtggaggaacgattccttgagtgtggccttaccaatctccatatcacaccggcgaacatcatggtcaaacagactctccaatgggaccttcttgcagcgttagtaatccggaagctggctgctcgtgctcgcaccagtgccatcaaccagatgacgtggatgatactgtttggttttaagctggtgtatatggatattggttaggtattgaaatcttgattcttatgtgaactcgagtttatttaattagaatattatattgtaatcgcattttataggctgtggagataaacttcttgaataatatattaaatattgcccacatttgctcataatttgtaggagtcaataacgcaacagaatgacttttgaataatatattagtcattgacatgagccggtgttttaaaaatgcttagtataatgggtaaattcttaatagtgaataaaaatattagaaaaaattggtttctggatgtgattcaattggatatattactattgaataggtaaacaatgaaccttattggatcaatgtgcgatatataaaatacacgttgttggaaatattcatctatctcttgataaactaacttttttgctcacttcttcgtacctnaaaatcttggggngattttttaaaggnaagttttgngctntatggatttttaaacttgacttaaaaaaaaanaagtcnaaatggtttcctaatattcaccgnnccannaaanatagttctaattattgngttancatttttttttaacttggaggcgtatnttggggntngggntnaanannttggaaattnattttnaaacttttagttttaaaanantn

SEQ ID NO: 1587 - DNA, 925 bp, Ctenocephalides felis
  misc_feature (750)..(750): n = unknown
  misc_feature (794)..(794): n = unknown
  misc_feature (796)..(796): n = unknown
  misc_feature (808)..(808): n = unknown
  misc_feature (817)..(817): n = unknown
  misc_feature (822)..(822): n = unknown
  misc_feature (825)..(825): n = unknown
  misc_feature (840)..(840): n = unknown
  misc_feature (849)..(849): n = unknown
  misc_feature (856)..(856): n = unknown
  misc_feature (862)..(862): n = unknown
  misc_feature (885)..(885): n = unknown
  misc_feature (902)..(903): n = unknown
  misc_feature (905)..(905): n = unknown
  misc_feature (909)..(909): n = unknown
  misc_feature (919)..(919): n = unknown
tgtgacagcactcaaacatgtgttttgtcaatactccatcatcaaatatcaaggctataattggaagctttttcccggaatcgtttgctggcacgggaaatgcgcataaaatgtatcccatgagtgaacactttttcacacttttggaagaaatgggttatttgcatctacaagctaccaaaccagatacagtgggcgttgctttaagagattcaccagctggtttagcagcttatattttggagaaattttcaacatggactaacagatcttggaggtcagttaaagatggaaacttgctgttaaaatacaatattcctgaacttttagacaatgtcatgatatactacgttactgattccattactacttcaatgagattatatgcagaatcattcacaaaagcacaccttgctttgaacttagatagggtgcgcaatcatgtcccagcagcctgcgcaaaatttccaaacgagttggcttatgtgacccgattgccaacttgctgagaaatataaaactttattgcagtccaatgacatgccaagtggtggccatttttgcagcatttgaggaacctggtctttaacagaagacattttcactgcggtgaaaaagtttaaaagaattttattccaaaaaagctgaagaaagccaaaagaaagctgatttgggataattttggtggtggatatataattatgctaataatatttggagataaatttaacccattcatggtcacatatnttttttccttcctccctttttttaaataaaaaaaaaaaaaactngngggggggcccgncccaattcnccttntgngagtcgattacaatnactggccgngttttanacggtnggactgggaaaaccctggggtanccacttaatggcttggnaanaatnccctttggcngtgggg

SEQ ID NO: 1588 - DNA, 892 bp, Ctenocephalides felis
  misc_feature (588)..(588): n = unknown
  misc_feature (619)..(619): n = unknown
  misc_feature (660)..(660): n = unknown
  misc_feature (694)..(694): n = unknown
  misc_feature (742)..(742): n = unknown
  misc_feature (763)..(763): n = unknown
  misc_feature (772)..(772): n = unknown
  misc_feature (791)..(791): n = unknown
  misc_feature (797)..(797): n = unknown
  misc_feature (816)..(816): n = unknown
  misc_feature (820)..(820): n = unknown
  misc_feature (848)..(848): n = unknown
  misc_feature (867)..(867): n = unknown
  misc_feature (878)..(878): n = unknown
  misc_feature (880)..(880): n = unknown
  misc_feature (889)..(889): n = unknown
  misc_feature (892)..(892): n = unknown
tatattcggatataatttctatgttttatcaaatatattgttaaaaatgttatagtgttattgtaaataattagtcattaataaaaaatggctacatatgaagaatttattcaacaaaatgaagatcgagacgggattaggcttacatggaacgtttggccttctagtaggatagaagccactagattagtagtcccgctagcatgtctttaccagcctttgaaagagaggcctgatttaccaccaattcaatatgatcctgtacaatgtacgagaaatacatgccgagcaattttaaatcctttatgccaagttgactatagagccaaattatgggtttgcaacttctgctttcagaggaatccgtttcctccacaatatgctgcaatttctgagcagcatcaaccagcagagttgattgcaagtttctctacaatagagtacaccatcacaagggcaccatgtatgcctccaatattttatatgtcatgggatacatgcatggatgatgaagaactgggtgctttaaaagctctttacaatgtctttaagttatggccccaaatctcttggtgggctagtacattnggaaaatggtcaggtcacgagtaggactgangtgtcaaagacttgtttagaggcctaagattaacagctaancaatcaagaaagttaggcattgtcggaagtgatncccaacacagaaaggcccaatgcccacaataagcgggccagccaatanatcatccacctttccataaangcaaatggntttaccggccttttggganaacggnaccagaaccttggcctgtncctnaagggaagggggcttacgttaactgggnctgatttttcgaagcccgngggccttttgngngctttttgnccn

SEQ ID NO: 1589 - DNA, 928 bp, Ctenocephalides felis
  misc_feature (556)..(556): n = unknown
  misc_feature (625)..(625): n = unknown
  misc_feature (701)..(701): n = unknown
  misc_feature (704)..(704): n = unknown
  misc_feature (725)..(725): n = unknown
  misc_feature (764)..(764): n = unknown
  misc_feature (786)..(786): n = unknown
  misc_feature (797)..(797): n = unknown
  misc_feature (801)..(801): n = unknown
  misc_feature (842)..(842): n = unknown
  misc_feature (855)..(855): n = unknown
  misc_feature (858)..(858): n = unknown
  misc_feature (875)..(875): n = unknown
  misc_feature (877)..(877): n = unknown
  misc_feature (881)..(881): n = unknown
  misc_feature (888)..(888): n = unknown
  misc_feature (907)..(907): n = unknown
tattcgttttacaaatcagtctcaaacgataaacacaaagtgaacgttttaaaacaaacataaaactgtgcctaatcccattcagtgatcgaaaaaactatataaaaccagttcgatagtaataatacataatttacccagcaacgtgcactgtataacctacaaatcacgatttcgactgaatgaaattatggacgctgaagatttgaatcagttctacaacgggcgggagatgggtgcttggcctcccaatgttggcatccttgccatcgaactgacgtttccgtcgcaatatgtcgaccaggccgaactcgaggcattcgatggagtgtcagcaggaaaatacacaattggactcggccaagcaagaatgggcttctgtggtgaccgagaagatattaattcattgtgtttaacagttgttaaaaatttgatggaaagacatcaagtgccttatgatagaataggttatttgggagtaggcacagaaacccttctcgacaaatcaaaaagtgtaaaatctgtccttatgcaattattcgaacccactgcaaangtgtactgatatcgagggtgtagatctacaaatgcttgttatgggggcactgctgcctttcaatgctgnttcctgggtcgaaagcagtgcttgggatggcagaatggctttgggttgttgctggaaacattgcagtatacccaanggngctgctcgtccaacaggaggngcaagtgcttgaaccatgctggtgggtcccggacttccnttgcgatgggacaaaggcttanggctttatgtntganacatgcttattgatttttccaacctggattgggttcaaagnttccccggtgganggnaaaataagttttaatgntntttngggagcnctggacccttggtttgctnttactgggaaaaaagggcaag

SEQ ID NO: 1590 - DNA, 922 bp, Ctenocephalides felis
  misc_feature (706)..(706): n = unknown
  misc_feature (708)..(708): n = unknown
  misc_feature (734)..(734): n = unknown
  misc_feature (756)..(756): n = unknown
  misc_feature (758)..(758): n = unknown
  misc_feature (781)..(781): n = unknown
  misc_feature (791)..(791): n = unknown
  misc_feature (806)..(806): n = unknown
  misc_feature (814)..(814): n = unknown
  misc_feature (827)..(827): n = unknown
  misc_feature (836)..(836): n = unknown
  misc_feature (839)..(839): n = unknown
  misc_feature (844)..(844): n = unknown
  misc_feature (877)..(877): n = unknown
  misc_feature (888)..(888): n = unknown
  misc_feature (908)..(908): n = unknown
  misc_feature (912)..(912): n = unknown
  misc_feature (921)..(921): n = unknown
tggtggcagcagggaaattcaactgactctcgacggagaaccgggggtcaagtataacggagtctcggactgggtttacgaagaggaaatgctgggttctggcgatgcactttggttttctccggacggtgcatatatcgcgatcggctgctttgacgactccaacgtcgacgaaatgatgtatttccgttacggagagtctggtactattgaaagccaatatccggaattggtagatctgcgatatccaaagcccggtagagtaaatccgacagccaaagtaaaagttctccgtctgaacgaagctcgtggtcgtaatatgccctggacggaactgacagctcccgaacaggatgttggcaaagatcatctgctagccgctgtcacctgggcctctaataacgaggtggcagtcacctgctaaacagacgccaaaactattctgttatgcaaatctgcaatgcagggaccggagaatgtaaaacggaactagaaaccagcatgcctggttggatcgacgtacgtaaattctggtttactcctgatggcgatcgttatataactatcagatctgtgcaacacacttgatggattacatatcctcatatagtaggagcccgaaagaaggacggaaccgaaaccaatccccagtgggaaatcgtctggtaccaatattataggttcgatgccgaacggggatcttttntnttactcagcaacattggctggaaacngtccccccaagaaattttggtngnccggttccaaagcttgtccttgnccgtcacttntgacccaaaatgganataatgcngatttggtaaagngatttaacnaanagttntttttgcttgcttgattggcttggaccaacccnccctttgcgtnctttttgaccggggaagatnaaancttgcaacng

SEQ ID NO: 1591 - DNA, 926 bp, Ctenocephalides felis
  misc_feature (669)..(669): n = unknown
  misc_feature (671)..(671): n = unknown
  misc_feature (706)..(706): n = unknown
  misc_feature (713)..(713): n = unknown
  misc_feature (725)..(725): n = unknown
  misc_feature (753)..(753): n = unknown
  misc_feature (778)..(778): n = unknown
  misc_feature (790)..(790): n = unknown
  misc_feature (808)..(808): n = unknown
  misc_feature (816)..(816): n = unknown
  misc_feature (839)..(839): n = unknown
  misc_feature (847)..(847): n = unknown
  misc_feature (851)..(851): n = unknown
  misc_feature (855)..(855): n = unknown
  misc_feature (879)..(879): n = unknown
  misc_feature (893)..(893): n = unknown
  misc_feature (905)..(905): n = unknown
  misc_feature (913)..(913): n = unknown
  misc_feature (923)..(923): n = unknown
  misc_feature (926)..(926): n = unknown
ctatttaaaattttgatatgcaatttgtgttaaatgcgttgtaaagaaaactatttatacctatttactgttgtctttattttgcttcatattgtatttttcggtatccataaatatcgttgtttgtgaaaatttgtgtgaaaaagtctattaagcatcttcaagtttggtatggctaaacctcacctgaagaaagtagcgttcctgaggacccgctatgtcacagcactaaaattaagatttttcttctttgtgacaataccagtttgttatttggtatttacagcgttaacaaaacaatccgtttcttctgaagatattgaatattacccgcagacaccagaaattactggatcgcggaaattgcttggcctatctttcaccgatgccaagaattcgagcctggcagatgatcatggtcataactgcacgcccgcagctatcttagattttccctctgatggattcaccagggagcaaagaagacagggctgggcgctggtccatgccgcatcgcattctactgcttcttggctattagcattagtttgcgatgactacttcgttccggcaattgagatgctgtgcaaaaagctagatatgaaggaagatgtcgccggactacatcatgggcgctgccagttctagtcctgaattattattaattcngnaggacttcatacagaaggagacctcggggtcggcncgggcgngggttcatctgnatttaatatactggccgccctgctgtgnggggctctttgtgggaaggtagtanaatttaaatggnggccagaacctcgggatntggcttgnttggatttgccgaattggccctnttcctacntttntaanatgggaaaagtttgtgggttgaanccctaaccctaaanctggcttatatntttttttngcgctttgtnctn

SEQ ID NO: 1592 - DNA, 943 bp, Ctenocephalides felis
  misc_feature (4)..(4): n = unknown
  misc_feature (570)..(570): n = unknown
  misc_feature (698)..(698): n = unknown
  misc_feature (726)..(726): n = unknown
  misc_feature (729)..(729): n = unknown
  misc_feature (744)..(744): n = unknown
  misc_feature (763)..(763): n = unknown
  misc_feature (774)..(775): n = unknown
  misc_feature (786)..(786): n = unknown
  misc_feature (796)..(796): n = unknown
  misc_feature (814)..(814): n = unknown
  misc_feature (816)..(816): n = unknown
  misc_feature (834)..(834): n = unknown
  misc_feature (838)..(838): n = unknown
  misc_feature (858)..(858): n = unknown
  misc_feature (866)..(866): n = unknown
  misc_feature (896)..(896): n = unknown
  misc_feature (899)..(899): n = unknown
  misc_feature (904)..(904): n = unknown
  misc_feature (907)..(907): n = unknown
  misc_feature (921)..(921): n = unknown
  misc_feature (924)..(924): n = unknown
tttntataaattaatatatcgttctcgttgttaccaaattatattatttaaattaagtgaaaaatatggccagtgttgtgaagcagttgccaagaatatccggctccaaagtagcgaaatgcatttcgagccgtaattattattcgtatgtaaatgagcctgcccaacaaatcaaagacaaagaaccgaaatgggttactgccgaagaagccgtaaaaattattaaatcagatgactgggtgtacgctcagggtgcggctgctaccccaatcaacttattaggtgcgatgactgcacatgggaagaagcaaggcctgaagaatgtgcgcgtctgccacatgcacactgaaggacctgcattatacgctcagcctgattgcgaagggatatttagatctgtatcattcttcatgggaggcaacgtacgtgcagctgtgaatgaaggacgaggcgatgcaattccaatcttcctatcagaaatacctcttctattccaaaagaaaattattcaacctgatgtagccatagttcatgtttctcctccagacgctcatggattctgcagtttangtaccagtgttgactgtgccagagcttgcgatgcaagcatcaaaagtgataattgcccaagttaatcctaaaatgcccgtcatttggtgactcattggtgcacaaaaagtcacatagatatgctgtanaaattggtgaaaccgtggtacccatggnggnaaaccacctaatganggaagaaactgcaattggngcacatattgnnaataacttggnggaaaaaggngcccactttaaatgggtntnggaaccattcctgatgcngttntttgccaacttccttaatcncaaaaatnttggaattcatttttgaaagtttggccaanggntaatngcnttaaaggaaagganggngttgttccaaaacctaaat

SEQ ID NO: 1593 - DNA, 929 bp, Ctenocephalides felis
  misc_feature (748)..(748): n = unknown
  misc_feature (759)..(759): n = unknown
  misc_feature (778)..(778): n = unknown
  misc_feature (783)..(783): n = unknown
  misc_feature (803)..(803): n = unknown
  misc_feature (809)..(809): n = unknown
  misc_feature (817)..(817): n = unknown
  misc_feature (833)..(833): n = unknown
  misc_feature (846)..(846): n = unknown
  misc_feature (892)..(892): n = unknown
  misc_feature (926)..(926): n = unknown
tcaaagaacgtgacaagaaaaatatgtgaattttgtatgttacataataatttttttatttcctcgagtatttgttaatttgcgtgggctgaattttcggggcgaaacttgtgatatgaacaaaattgagatggctgaagctgcatcacctagtacagaaatgccacactcaggtggagaaccagggacaccaatgggttcagttgttggtgcttcaggtgaacttgcggggctgagcccagaagaagctgaattgaaaagagctgagtggagccaagagcttgcaagagtggaagaagaaattggtactctaagaactgttttggcaagcaaagttcgaagaagtggagaactgaaagctaagttaggtatcactgtttggaaagaactaactggggatgtcaatcaaagtctacgtactgttaaagagagtcaagtctatggtaatattgaaaattgtattggacaaataagtaaagcttgtgactagtgcacctatttaccagaaaacagaattggtactgaaatctactgccgaaaaaactacttctttgttaggtggaatactggtggtttgacatccaaaattgtcagatgagaaatctgaatctttcaaatcactagaagaaaaaatgggttcagcctatgaaaacgttaaaacaaaagttcatcatctcgttctaattctattcaaaattttgatgaagcattgcgtgaagcttaacaagattctgttcaacttctactnttcctgaaaantcaatttcaaccagtaccntttgnttcaaagctcctcttggttntttatnaaattttnaaaaattagtaaccanggaaaagtccggnccacccgaagatgttttttcctaccaaacttggttcacatactttnttggaaatcttttccatccaattcattatttttnaag

SEQ ID NO: 1594 - DNA, 938 bp, Ctenocephalides felis
  misc_feature (3)..(3): n = unknown
  misc_feature (21)..(21): n = unknown
  misc_feature (29)..(29): n = unknown
  misc_feature (59)..(59): n = unknown
  misc_feature (507)..(507): n = unknown
  misc_feature (551)..(551): n = unknown
  misc_feature (572)..(572): n = unknown
  misc_feature (592)..(592): n = unknown
  misc_feature (612)..(612): n = unknown
  misc_feature (689)..(689): n = unknown
  misc_feature (693)..(693): n = unknown
  misc_feature (704)..(704): n = unknown
  misc_feature (721)..(721): n = unknown
  misc_feature (723)..(723): n = unknown
  misc_feature (749)..(749): n = unknown
  misc_feature (752)..(752): n = unknown
  misc_feature (765)..(765): n = unknown
  misc_feature (778)..(778): n = unknown
  misc_feature (788)..(788): n = unknown
  misc_feature (791)..(791): n = unknown
  misc_feature (797)..(797): n = unknown
  misc_feature (805)..(805): n = unknown
  misc_feature (810)..(810): n = unknown
  misc_feature (812)..(812): n = unknown
  misc_feature (821)..(821): n = unknown
  misc_feature (823)..(823): n = unknown
  misc_feature (847)..(847): n = unknown
  misc_feature (850)..(850): n = unknown
  misc_feature (858)..(858): n = unknown
  misc_feature (861)..(861): n = unknown
  misc_feature (873)..(874): n = unknown
  misc_feature (888)..(888): n = unknown
  misc_feature (892)..(892): n = unknown
  misc_feature (900)..(900): n = unknown
  misc_feature (912)..(913): n = unknown
  misc_feature (925)..(925): n = unknown
  misc_feature (934)..(934): n = unknown
cgnttggctcatcgctactgncgaatatnacaacagtcaacttaggttacaacttgtgngaccttcatcatcttgtacaacaatctcatccccatatctttgcaagtgactttagaagtagtcagatttatgcaggcgatttttataaacatggacgtcctaatgtaccattcagagtctgatacaccagccatggccaggacttcaaatctaaacgaggaattggggatggttaaatacgttttcagtgataaaacaggaacgttgaccaggaatgttatgaagttgtctaagtgttctattggtggaattatttattcttgtcctgattgcccggaaggcagctttagagatagtccggttgatggacttgatattgaggatgctcagaaaagcgatctggttcagaatttactcaacaatcatccaacagtcgacttgcttaaagaatttatgagtttgctatcggtttgccatactgtgatacctgaaaagagcgaggatggnaaaatcattatcatgcatcatcaccagatgaaaagactttagtnagtggtgcaaagaaataccgnttcttcatttgaaacccggncaccacatcaccgtaaaaantaaacgcttggggtgaaattttaaaaattgagatattggatggtctcgaatttacttcaacaggaaaagaatgtttnttgnttggtagaacncccagggccaattaaantnttttggtaaaggaccagattcctggnatnttttgaaaggttngccaaagaggacnccaatttcgngangtaacnttggaaanctttngnccaatttgntnaggggggggcccggtccccaattnccnttaagggnggnggattacaattnntggccgcggtttcnaccncgggactnggaaaacctggnntttcccacttantccttggangcct

SEQ ID NO: 1595 - DNA, 929 bp, Ctenocephalides felis
  misc_feature (544)..(552): n = unknown
  misc_feature (554)..(572): n = unknown
  misc_feature (579)..(579): n = unknown
  misc_feature (594)..(594): n = unknown
  misc_feature (604)..(604): n = unknown
  misc_feature (620)..(620): n = unknown
  misc_feature (623)..(623): n = unknown
  misc_feature (629)..(629): n = unknown
  misc_feature (638)..(638): n = unknown
  misc_feature (645)..(645): n = unknown
  misc_feature (651)..(651): n = unknown
  misc_feature (670)..(670): n = unknown
  misc_feature (674)..(674): n = unknown
  misc_feature (697)..(697): n = unknown
  misc_feature (703)..(703): n = unknown
  misc_feature (707)..(707): n = unknown
  misc_feature (718)..(718): n = unknown
  misc_feature (724)..(724): n = unknown
  misc_feature (774)..(775): n = unknown
  misc_feature (791)..(791): n = unknown
  misc_feature (795)..(795): n = unknown
  misc_feature (816)..(816): n = unknown
  misc_feature (826)..(826): n = unknown
  misc_feature (835)..(836): n = unknown
  misc_feature (848)..(848): n = unknown
  misc_feature (854)..(855): n = unknown
  misc_feature (860)..(861): n = unknown
  misc_feature (871)..(871): n = unknown
  misc_feature (878)..(879): n = unknown
  misc_feature (887)..(887): n = unknown
  misc_feature (890)..(890): n = unknown
  misc_feature (904)..(904): n = unknown
  misc_feature (921)..(921): n = unknown
  misc_feature (928)..(928): n = unknown
cttttcgatgttgatgccaaaacagaaccgtgtcgcaatctacgagcacctctttaaggagggagttatggtggccaagaaggactaccatgcaccaaaacacccagaattagagcaaattccaaacttgcaagttattaaggctttgcagtcgttgaaatctagaggatatgttactgaacaatttgcatggaggcatttctactggtatctgacaaatgaaggtattgaatacttgaggacatacttgcacttgcccccagagatcgtgccctccactctcaaacgtcaaaccaggcccgaattggcaaggccaagaccagctgccggcccaaggactgaaggatctcgtccagctgaagacagatctgctaccgtagggcacctggtgcacctggtggcgctgacaagaaggctgatgtcggtgctggcactggagacttggaattccgtggtggatatggacgtggcagacctgccctcaataaatttatataaagtaatttataataaaatatcaataaaacatcttattgataaaccnnnnnnnnnannnnnnnnnnnnnnnnnnnaacttgngggggggccccgggncccaaatccncctttagggagtctantanaattcnctggccggngttttanaacgtngggatgggaaaaacctggngttnccaaattaattcccttggaaaanatcccntttnccagttgggtnaaaacnaaaaaggccccaaccgatcccctttccaaaaatttgcccaccttaatggnnaaagggaaatttgaancttnattttttgtaaaaatccggtnaaattttggnaaaaaactnntttttaaccaanaggccnnaaatnnggaaaatccnttttaannaaaaaaanaancccgaaaaggggtnggggttttccaattggnaaaaaant

SEQ ID NO: 1596 - DNA, 935 bp, Ctenocephalides felis
  misc_feature (556)..(556): n = unknown
  misc_feature (603)..(603): n = unknown
  misc_feature (620)..(620): n = unknown
  misc_feature (643)..(643): n = unknown
  misc_feature (662)..(662): n = unknown
  misc_feature (667)..(667): n = unknown
  misc_feature (687)..(687): n = unknown
  misc_feature (697)..(697): n = unknown
  misc_feature (726)..(726): n = unknown
  misc_feature (733)..(733): n = unknown
  misc_feature (737)..(737): n = unknown
  misc_feature (743)..(743): n = unknown
  misc_feature (745)..(745): n = unknown
  misc_feature (747)..(747): n = unknown
  misc_feature (752)..(752): n = unknown
  misc_feature (755)..(755): n = unknown
  misc_feature (766)..(766): n = unknown
  misc_feature (780)..(780): n = unknown
  misc_feature (803)..(803): n = unknown
  misc_feature (809)..(809): n = unknown
  misc_feature (811)..(811): n = unknown
  misc_feature (813)..(814): n = unknown
  misc_feature (828)..(828): n = unknown
  misc_feature (834)..(834): n = unknown
  misc_feature (836)..(836): n = unknown
  misc_feature (839)..(839): n = unknown
  misc_feature (841)..(841): n = unknown
  misc_feature (846)..(846): n = unknown
  misc_feature (848)..(848): n = unknown
  misc_feature (856)..(856): n = unknown
  misc_feature (866)..(866): n = unknown
  misc_feature (892)..(892): n = unknown
  misc_feature (899)..(899): n = unknown
  misc_feature (923)..(924): n = unknown
  misc_feature (929)..(929): n = unknown
  misc_feature (933)..(933): n = unknown
ttcctgttattgcattcaccaacactgattctccattgaaatttgttgatattgcaattccatgcaacactaagtccaaccattccgttggtttgatgtggtggctgttgtccagagaagtcttgagacttcgtggatcaattccccgtgagaagacttgggatgtcgtagttgatttgttcttctaccgtgatccagaggaagtagagaaagaggatcttgttcacaaggaagttgtggccaaagttgagactgctgttgctcatgatactgctgaagtatgggcaggagatgagccagccactcaattatggactgatgatgcacctgttgctgcagttccggctgtttaccctgctgctgccagccaagattgggccgagcaagtgcaagaagaatgggctgccaaccctaccccagctgctggtcaaactacttggggaagctccacacaagaatggtcataaatcaaatgatactttttgtattggataaatgaaataaatgaaaattaaaattaaaaaaaaaaaaaaaaaaaaaaaactcgagggggggnccggtcccaattcgccttataggagtcgtattacaattcctggccgncgttttacaaccgtcgngactgggaaaaccctggcggtanccaacttaaatcgccttgnagaanaatcccctttcgcaactggngtaaaaaacnaaaaggccccacccgatcgcctttccaanaattggncaancctgantngngaatnggnaaatttgaagngttattttttggtnaaaatcccggttaaatttttgtnaaaaangntnnttttttaaccaaanggccgnanttngnaaatncnttttaatnaaaaaaatancccggaatggggttgggtttttttcnatttggnacaaaaatccctttttaaaaaacnnggccnccanct

SEQ ID NO: 1597 - DNA, 941 bp, Ctenocephalides felis
  misc_feature (630)..(630): n = unknown
  misc_feature (643)..(643): n = unknown
  misc_feature (672)..(672): n = unknown
  misc_feature (678)..(678): n = unknown
  misc_feature (721)..(721): n = unknown
  misc_feature (734)..(734): n = unknown
  misc_feature (764)..(764): n = unknown
  misc_feature (772)..(772): n = unknown
  misc_feature (779)..(779): n = unknown
  misc_feature (793)..(793): n = unknown
  misc_feature (835)..(835): n = unknown
  misc_feature (860)..(860): n = unknown
  misc_feature (870)..(870): n = unknown
  misc_feature (887)..(887): n = unknown
  misc_feature (919)..(919): n = unknown
  misc_feature (932)..(932): n = unknown
  misc_feature (940)..(940): n = unknown
tgctttgtggaaggaaagtctaaaataagaatataaactatgccgggtaccgggacgttcaaattattcatcggaaatcttgacgaaaaaactcaagcgtcagatatacgtcctctgttcgagaaatacgggacggtcgtcgaatgcgatgttgtcaagaactttggttttgttcatatggagaccgaacagcaaggtcgggatgcaattcagaacctaaacggctacgtaataaacggcgaggccataaaatgcgaagccgccaagagccggagggcgccgtcaaccccgacgacaaagatattcgtcggaaatttgacagataaaactcgcgcgccggaggttcgcgaactgtttcaaaaattcggtacagtcgtcgaatgcgatatcgttcgtaactacggtttcgtgcacttggacgcgagcggtgacgtgaacgaggcgattcgggagctgaacggaatgatggtcgacgggcaacccatgaaagtgcaagtgtccacgagtcgcgtgcgccagaagccgggcattgggtgatcccgacaatgctaccgctgcgggcgtgggggacactggtccaaggagtgtccccgtgccatgggggccgatcgtaacggctttccgggagangatgttcggttgngaccggtaccttcgccggcggcaccggcnttctgngccaaccggatgatgggccggattcccgggattctattgaccnttcttcgatagangttttgatggttcaagggatttatttgganaggcgttnttctggngggaatgcccggtntgcgtgggggggccaaaatttattgccgcccaaggaaaaaancttttgcctcctttccccctttagnaataaaaaangggattgggatttttanggcctccaacttttattccattttttaccggngtttccccaaggngggttgcng

SEQ ID NO: 1598 - DNA, 937 bp, Ctenocephalides felis
  misc_feature (4)..(4): n = unknown
  misc_feature (707)..(707): n = unknown
  misc_feature (723)..(723): n = unknown
  misc_feature (747)..(747): n = unknown
  misc_feature (769)..(769): n = unknown
  misc_feature (779)..(779): n = unknown
  misc_feature (785)..(785): n = unknown
  misc_feature (790)..(790): n = unknown
  misc_feature (815)..(815): n = unknown
  misc_feature (832)..(832): n = unknown
  misc_feature (840)..(840): n = unknown
  misc_feature (845)..(845): n = unknown
  misc_feature (862)..(862): n = unknown
  misc_feature (876)..(876): n = unknown
  misc_feature (900)..(900): n = unknown
  misc_feature (907)..(907): n = unknown
  misc_feature (913)..(913): n = unknown
  misc_feature (931)..(931): n = unknown
  misc_feature (935)..(935): n = unknown
aacntttttaagtgatttatttattttatattattgttgtaaaattacaattttcaaaatgagattaggagccacagtacccaatttcaaggctgacaccacagaaggacccatccagttttacgactggtctggcgatagttgggttgtgattttctcccatccagctgacttcacacccgtctgcaccacggagttgggtcgcatggccgtccaccagccgcacttcgtcaagcgcaacaccaaattgctcgccctgagcgtcgacgacttgcagagccacaaggactgggtcaatgacatcaagtcttactgccaggacattcccggaaaattcccgtacccaatcatttccgatccgaaacgcgagttggctgttgccttggacatgatcgacgaagagcacaaggacgaccctgctcacgccatgaccgtcagatctttgtcgtgatcgatccgaaccacaaattgagattggccatggtttacccattcagcactggacgtaatgtcgacgaaagtattacgtgtgatcgactctatgcaattgactgatcgtctgaaagtcgtcgcaacgctgccaactgggttccttgggggaaaaaagtaatgatcctgccttccgttcagaatgaaggaagcagccaactgtttccaaaaggtggtgacacttgttctatgccttcaggtaaaggttttggtgcccncaccgactggtttttnaaaaaaaacaagaactttttttgnttccttaaaaatttttaatccntttccaaatntttgcnaaaanttttaattttttttttatgaacaantttttgaaccctaagcnttttaaanttttntttccgggatcaattanctttaaggatgggngtttttaaaaaagattttttccanggttttntaaatntgggaaacccttttttgnaatntt

SEQ ID NO: 1599 - DNA, 648 bp, Ctenocephalides felis
  misc_feature (553)..(553): n = unknown
  misc_feature (580)..(580): n = unknown
  misc_feature (586)..(586): n = unknown
  misc_feature (597)..(597): n = unknown
  misc_feature (633)..(633): n = unknown
  misc_feature (642)..(642): n = unknown
  misc_feature (647)..(647): n = unknown
gtcttccggccagggggcctttggcgggacatacacttgtgagagcaagggcaccgccgtctccggagccgttttgcccggagcaccaggacgagaggctaggattttactgtttggcgtgcaaggaacctgcctgtgcgagctgcctgcagacggagcgacacgccagtcatgacgtgcaggcgatcactgcaatgtgcaaggcgcaaaagactgaattatcccaaaatctgcaacagctttctgaaaaagcgaggtctacgacagaattcatacaacggctaaaagggatgagtgacaaggttatggaatcatgtacagaatttgaacacttagtaacagcacaatgtgatgcattgatcacagctattttaaataggcgagattatctcctagaggcaatacgatgtgatagagaagctaaactcagagcactcaaggaccagcatcaactgctacaggaaaattacaacacacgacaggttaatacaatttgatagaggcttcaaagaaacgatagtgtgattttacaggtggttcatgtatagccganggccaacgacatcgctgcatcggaggnagagcncgcggtgtttnacagtcatctacctgacgacaggcgtctaggcatgncattacttntcaang

SEQ ID NO: 1600 - DNA, 650 bp, Ctenocephalides felis
  misc_feature (547)..(547): n = unknown
  misc_feature (565)..(565): n = unknown
  misc_feature (582)..(582): n = unknown
  misc_feature (610)..(610): n = unknown
  misc_feature (633)..(633): n = unknown
  misc_feature (636)..(636): n = unknown
  misc_feature (638)..(638): n = unknown
gatgctcttggggtttccccagtgggtccaccaatgtaaataatcgaatcgttggaggcaaagacaccacaattcaagaacatccttaccaagtatcaattttgtacaatgatgaatatcacagctgtggaggttctttgatttctgaaaaatgggttttgacagccgggcattgcatcgattctttcaaattctacatccgtgtgggaagttctcttgaaggcgaaggtggagctgtgcatcgagctctaaaacaatatcgacatgaaaagtttgatgcaaaaactgtagattatgattatggattaattgagttagacacaccggtacaacttagtgaaaatgtaaaattagtcaaattggctgaacctggtgttgaacttgaagaaggaactctactaaatgtcacgggatggggtagccgtcgatccagcgcagctctacaaatagtaactgtccatatgtatccgaagaagtctgcaaaaaatcacattcagacaggtgatctcccatatatgtctgtgtggtaaaatgcaggaggagaagnccttgcatggtgacttgnggccagtgatcaatggntcaattggattgttctggacttgatggnctccactttctcgttttgtaatncgntntcagatggtaag

SEQ ID NO: 1601 - DNA, 649 bp, Ctenocephalides felis
  misc_feature (5)..(5): n = unknown
  misc_feature (174)..(174): n = unknown
  misc_feature (502)..(502): n = unknown
  misc_feature (577)..(577): n = unknown
  misc_feature (613)..(613): n = unknown
  misc_feature (619)..(619): n = unknown
  misc_feature (642)..(642): n = unknown
  misc_feature (644)..(644): n = unknown
atttnagccaaccagcaagcagaaacattgcagactcaattaaatctaatgtcccagcaacgagatgaacttttggccaagatgagtgacactgaagacaaatataatagacaagttgctgctctaaccaatttgcaatgtgccttagaacaattccaaagagataaagatcangaaatccaccaatgcacagaaaggataagaaaccaattggaattggaacgacaggaacaaactgctttaaggaacgaaatccaatccctaaaaacgcaacttagtgaacaacaacaaggcctgatggctgcaggaagacttgccagtcaacttgaatcctcacaaacaactgtacaaaatctcagacaagaattgaaagagagccaagacaaatacgctgctctgaccgccaaagtggagtcttcaaaaaacaaccaagccgacaaaatcgagaagagcttgtaaaaacctaatgctcggtacatccagctggtcaacaaaacgacangcacaaatctaaaatatatagcagtctcgacttcaccagtcggatgcgaccgatagctttgagcaccaaaatatntggttgagatctgtctggatggagagaggctgtaancttgcnattttgggaagatttaccaacgntnggagg

SEQ ID NO: 1602 - DNA, 646 bp, Ctenocephalides felis
  misc_feature (513)..(513): n = unknown
  misc_feature (543)..(543): n = unknown
  misc_feature (583)..(583): n = unknown
  misc_feature (617)..(617): n = unknown
gttttgtggagctactggtagagctagcaactttttattatccgtcaggtgtgttaaggaaaaagataaacctgtgtcgatgggttttggattgatgataatgtccttgtttgccttcgtaccgtcaccaatattttttggagcaattctagatcaaacatgcatagtttggggaaaaacatgttccggaactggaaactgctggctatatgatgttgaatctttgcgttacatcatgaatttaacggcagcttcttttgtcacaattggagtattatttgatgtcggagtttggtatttcgtcaaaaatttaaaaatttacgatgaacctgatgatgacgaccaagaaatgaattctttgaaggcgcaaaaggcggatggagctgctgcaacttattccaatcgaatctctctatacaaagtcatataaagaatagtacttgaggaatttaaaattaatttaagttgtaatgcaaaaaatgtaactgattaaaatatataaataaataagtngaactataaaaaaaaaaaaaaaaaactcgngggggcccggtcccaatcgcctataggagtcgatacatcnctggcgcgttacacgcggctggaaaccctgcgtncactaatccttgagacatcccttcgcagt

SEQ ID NO: 1603 - DNA, 643 bp, Ctenocephalides felis
  misc_feature (4)..(4): n = unknown
  misc_feature (548)..(548): n = unknown
  misc_feature (588)..(588): n = unknown
  misc_feature (630)..(630): n = unknown
  misc_feature (643)..(643): n = unknown
caancatccatgttttattctgtatatatgtttgtgatggcaattgtttattgatatgaaattaaattaatatttcgataaaacattcgttattattagaatatttgttctagataagttaaattattttaaggggtcttaagtatttgttttatttgttcgtttaattgtgatgtagaattgtgagaattcaatataatatattaaaaatgtttcggcaagacaattcaaaagcttttatgaaagaccctcatactgcgaattgtaggatttatattggaaatataaacgagcatgtgaattctcaagaaatagaaacacatttcgcaaaatatggaaaaattctcggcgttttgctacacaagggatttggctttatccaattcgaaaaggaacaatctgtcaatgaagccatcaaaatggaacatcaaaatatgtttcatggcgaaacatgattgtgagacgagccaaagcaatgtaggaggagcaggtggtactctgcaggcctgtacgcaggtctctccgaatcgtgatcgggccgttccagnactcacacatgagggcagacaggtctggtccggcctgtcncttgtgcctcgcattgcagcggagtggttggggctcaaagcnggcgtgtgtgaan

SEQ ID NO: 1604 - DNA, 651 bp, Ctenocephalides felis
  misc_feature (511)..(511): n = unknown
  misc_feature (565)..(565): n = unknown
  misc_feature (577)..(577): n = unknown
  misc_feature (592)..(592): n = unknown
  misc_feature (603)..(603): n = unknown
  misc_feature (621)..(621): n = unknown
  misc_feature (624)..(624): n = unknown
  misc_feature (651)..(651): n = unknown
tgtttatattccttcaaaatgtccgtacgtgtgcaattcgaaaacaacaatgaaatcggtgtttttagcaaactaacaaacgcttattgtctcgtagcgatcggcggatctgaaaacttttatagtgtcttcgaggctgaattggcagagactattccggttgtccatgctagcattgcagggtgtaggatcattggcaggttgactgtggggaataaaaatggtttattggtgccagcttcgacaactgacacagagttgcaacatataaggaattctttaccagaaagtgtaaaaatacaaagggttgaagaaagattatcagctttgggtaatgtgatagcttgtaatgattatgtagccctagtacatccagatcttgataaggaaactgaagaaatcctaacagatgtctaaatgttgaagtattccgcaaacagttgcagtaatgtcctagtaggctcatacacagttttaagtaaccaagggggcttagtgcccccaaaacatncatacaagacaagacgagcttcgtcatactcaagtccgtagtggccggacagtnccgagcaggagntttagcagaggttgnagcaacattgngctctctggggatggccnacncactgactagtggatgaagcggtcacn

SEQ ID NO: 1605 - DNA, 637 bp, Ctenocephalides felis
  misc_feature (537)..(537): n = unknown
  misc_feature (541)..(541): n = unknown
  misc_feature (551)..(551): n = unknown
  misc_feature (563)..(563): n = unknown
  misc_feature (591)..(591): n = unknown
  misc_feature (602)..(602): n = unknown
gttttaaagaatatcaagtgtaaattaaacgcgatttaaatttattgtaacatcaaaatggtgactttgacatcttttataaatacattcaacaataaactggaagcgccagtccagcaacatctcaaaggcgtctacgggtgtctggcagctacaacatcattagctagtataggggcttacagtttccttgcaggatggctctcagcaggattgttgccggctttaggagccctaggattaggcttgggcttgatgatgacctctccagatgccaaaaattttaatatgagactaggaatgctgttaggattaggattcttgtcaggtttaggattaggacccttactagctcatgtggcccaaatcaatccaagtataataacaactgcattatttggcactactttagtattcgtggcattcaacttatcagcaatatttgctgaacgtggaaaatggtattcctgggtggaattattgcagcgtttgaatatgatgtcttctcctcttggcaattttctgcaaagactttgnttcnagctcccttntgagatattgtntggggcttggccttatgatccagctttnttgaaaatcanactggacccaccagtggctctttgctgtcttgatt

SEQ ID NO: 1606 - DNA, 644 bp, Ctenocephalides felis
  misc_feature (33)..(34): n = unknown
  misc_feature (436)..(436): n = unknown
  misc_feature (570)..(570): n = unknown
  misc_feature (618)..(618): n = unknown
  misc_feature (625)..(625): n = unknown
  misc_feature (633)..(633): n = unknown
gtttttcagcctatgcatatttaggagaatttnntggagataaaacaagagccagggcaatcagttggggagcttcttttatttctatgggaatggtatttttgccagcaattgcttggggaataattcccctcaacttcagatatcccataccaggtttgggcatagactggacggcctggaggttgtacgtcctgatctgctcgcttctaatcttttgggcctgattatgattataacatttccagaaacaccaaaatttttgttggccactggaaaaactgaagaagcactcgatgttcttgctaggatgtacgccagcaataaaggccgtaagccttctgactttccaataaaatccctggacatttctggtgtttctggtaacctggcaaaagctggaaatgctcgtgaaattgcttctctcatgatacancaaacagttccattattcaagaaaccacttgtaaatcacacttttgattgtattgtgcagttggaatgttgcatcttcagtggcatgtcatgtggtccagtgatagctacgatttgatgcatatatgacaattngcactatatgatgctgtcagttttgataaggccaatcctccatccttngacaatntgctcaangatccgggttc

SEQ ID NO: 1607 - DNA, 650 bp, Ctenocephalides felis
  misc_feature (571)..(571): n = unknown
  misc_feature (631)..(631): n = unknown
  misc_feature (635)..(635): n = unknown
  misc_feature (642)..(642): n = unknown
gttgggcccaatggtgtaggcaaatccacattcttgaagttattgactggtgacatcacaccaatcagaggagaagtaaaacgcaaccatagactgcgcatcggtcgttttgaccagcattctggtgagcacctgactgcggatgaaacgccggccgagtacctgcaacggctgtttgatttgcaacatgaacgtgcaaggcgagccctcggatctttcggtttgatttctcgtgctcatactgtatgcatgaaggatctctcaggaggacagaaggctagagttgcattagctgaattatgtcttaatgcgcccgatgttctcattttggatgaacctacgaataaccttgatattgaatcaattgatgcattggcagaagccataaatggatataaaggcggagttattgtagttacgcacgacgaaagacttattagagaaaccgattggccttatatgtgatagaagatagaacgataaatgaggtggatggagattcgatgactatagaaaggattattagaaagctgggtgaagtagtgaataatcaagtattgccgtaatgcanagtatcataaaagatatacatatacataatgctgatttacttcaatctatatgatatgcnttgnaataaangataagaa

SEQ ID NO: 1608 - DNA, 637 bp, Ctenocephalides felis
  misc_feature (4)..(4): n = unknown
  misc_feature (597)..(598): n = unknown
ttgntcgtcgttttggccactttggccacattagtggcagctgatggaggatacaaaggttacaaaatctacgacgtgactgtaacaaattcaatccaagaagcagcccttagatcaataggtaacagtggcgaattcgatttctggagtccctcaagggtccttgtaaaacctgaacaaatcgcaaaattcgaaggacttttgaaaactggaggaatcgacttccaagtttttgttgacgacgttgacgaatttgcacgtaaggaaaaagccgaaaatgaagtcgccgaatctagggccgaagggcgcttgtccttcactgcttatcatcgttacgatgtgatccaacaatacttgagcgaaatggcatccaaacacccagatttagccaaggtcgaaaccatcggcacttccagcgaaggaagaccgatcaaagcgctgcgcttatccagcggaggaaacggtacaaaccggttgtggtatggcctgcatccacgcccgagaatggtggcaccaaccaccgcttgacttgtagaccaaatctggaacggccgacatattattgcgaatggatgggtcatcattctgtttaatctnnggtacaatctctacctgggacgtttgagaaaccgacaga

SEQ ID NO: 1609 - DNA, 642 bp, Ctenocephalides felis
  misc_feature (4)..(5): n = unknown
  misc_feature (550)..(550): n = unknown
  misc_feature (578)..(578): n = unknown
  misc_feature (609)..(609): n = unknown
  misc_feature (627)..(627): n = unknown
  misc_feature (641)..(641): n = unknown
gacnncggtgatgacagaggccgggatggcgattggacatgtcctagttgttccaacaccaactttgcttggagaaatgcctgcaacaggtgtagtgaagaaagacctgatggtgcaggcggcggtgactccggccgaggtggtggccgtggaggcggccgcggcggtggtggtggaggtggtagttacggtaaccgcggaggtggtgatagagattctggtcgcggtggtgatagaggttttcgcggaggtggtggccgcggtggcggtggcggttatggaggtggccgcggaggcggtggtgatcgtaattctggaggaggtggctcaatgcgtggaggagatagaggacgagataggcaacgaccttattaaataattagcttgtaattttattcaccctcattttcacatcattcgtactcatattagatttattgatttttagaattatttatatgatttgtatgattcaatgtaacacaatattgtaaatcttatattaagatttaataatataaaataatagaaaaaaaaaaaaaaaactcgngggggcccggacccattcgcctatagtngctatacaattactgccgcctttacacgtcngactggaaaacctgcttnccacttatcgcttna

SEQ ID NO: 1610 - DNA, 634 bp, Ctenocephalides felis
  misc_feature (530)..(530): n = unknown
  misc_feature (577)..(577): n = unknown
  misc_feature (584)..(584): n = unknown
  misc_feature (586)..(586): n = unknown
  misc_feature (593)..(594): n = unknown
  misc_feature (624)..(624): n = unknown
  misc_feature (628)..(628): n = unknown
  misc_feature (634)..(634): n = unknown
acttttcgatcaattcgtattagactttttgataaaaaatgctgtctaaagcttcgcttttggccaaggtatcccggccactgactgtggcagtgcgaacaacatcccaggctgcaacatgccctgctcctacaaaggtagaagaagccgatagtgctgaaagagatttggtcaacttcccaaggccaacacgtttggaacattcacctaaagttcgctttggattcattccagactcatggtttgaatttttctatgagaagaccggtgttactggaccttacatgtttggaactggtttaattacttacttatgttcaaaggaaatttacgttatggagcatgaattctatactggtatttcattgggtattatctgtctctatgccactaaaaagttgggtccacatattgcaaaatacttggacaaagaagtgatgcctatgccgatgaatggaattcagtcgtgtagaagaagtaaaagtaccaagatgccattgaaggagaaagtggacaatggagactgaagncacttatgtgtggtgccaacgtgaaatgtgcctgcacttgacactanaggaccncntgaagtnntagaggtagaaacatattccagttggaaangaanttgacn

SEQ ID NO: 1611 - DNA, 639 bp, Ctenocephalides felis
  misc_feature (3)..(4): n = unknown
  misc_feature (537)..(537): n = unknown
  misc_feature (556)..(556): n = unknown
  misc_feature (559)..(559): n = unknown
  misc_feature (562)..(563): n = unknown
  misc_feature (569)..(569): n = unknown
  misc_feature (596)..(596): n = unknown
cannatgccacgaggaaaatataccaatcacaaagggcgtaacaggcatttcacaaatccagaagagttagaggaacagagaaagcaagaagaacaaaaaaggcaatggcgtagggatcatggaaacgaatcaagttctgaggaagaggaagtagccaaaaaagctgcaggtgataagaagaaagccccagggctggaaagctctgattcagagagtgaatcggagactgaatcttcagaagatgagaaggataagaagaaaggtgtatctggattgatagaagtggaaaatcctaatcgtgttcaaaaaaaaaccaagaaactttctactttaaatgaaacattaactgatagcaaaccacaattgtcaagacgagaaagagaagaagttgagaagcagagagcgcaagcacattaccaaaagcttcatgcagaagcaaaactgtcaagcaagatctgtttagcaagacttgcatcattaaacacagcgtgaagaacagcttaaagaccgagttggaaaaaaaaaaaaaaactcgnggggggccggacccattcnctntgnngtcgtntacatcatgccgcgtttacacgtcggntggaaacctgcgtacccacttatccttgagactcccttgccgt

SEQ ID NO: 1612 - DNA, 640 bp, Ctenocephalides felis
  misc_feature (5)..(5): n = unknown
  misc_feature (559)..(559): n = unknown
  misc_feature (573)..(573): n = unknown
  misc_feature (576)..(576): n = unknown
  misc_feature (585)..(585): n = unknown
  misc_feature (595)..(595): n = unknown
  misc_feature (602)..(602): n = unknown
  misc_feature (606)..(606): n = unknown
  misc_feature (617)..(617): n = unknown
  misc_feature (628)..(628): n = unknown
  misc_feature (636)..(636): n = unknown
atttntgttggttaactcgagcagtaagaatatataaaaatggctgcagttggcaaagatttagaaaaaccaacagctgaggtgcctcaggtccatcgcatccgtataactttaacttcaagaaatgtacgttcattggagaaagtatgtaccgatttaataaatggagccaagaaacaaaagctccgtgtgaagggaccagttcgcatgccaaccaaaatcttgcgtattaccacacgtaaaacaccttgtggtgaaggttcaaaaacttgggatcgcttccaaatgagaatccacaaaagagtcatcgatctgcactctccatctgaaattgtgaagcaaatcacttccatcagtattgagccaggtgtagaggttgaagtaacaatcgctgatgcttaaattttgtaaattgatggaaataaatgacaaaacctaaaaaaaaaaaaaaaaactcgagggggggccggtcccaattcgcctatagtgagtcgtatacaattcactggcgcgtttacacgtcgtgctgggaaaccctgcgtacccacttatcgcttgnacacatccccttcncantgcgtatangaaagccccncgatcgncttncacagtgccanctgatgggaangcaattgnagct

SEQ ID NO: 1613 - DNA, 644 bp, Ctenocephalides felis
  misc_feature (470)..(470): n = unknown
  misc_feature (569)..(569): n = unknown
cactttgaggttttgatccttaaccatggtgaacggacgcatcccgtccgtcttttcgaagacatatgtaacccctcgtcgtccttatgaaaaggctcgtttggaccaagaattgaaaatcattggagaatatggtctccgtaacaagagggaagtatggcgtgtcaaatacactttggctaaaatccgtaaagctgcccgtgagttgctcacattggacgaaaaggatggcaaacgtctcttcgaaggtaatgctttattgcgtcgtttagtacgtattggagtgttggatgaatccagaatgaagctcgattacgtgttgggtttgaaaatagaagatttcttggaacgtcgtctgcaaacccaagttttcaaactgggattagccaaatcattcaccacgctcgtgttttgatccgcagagacacattcgtgttcgcaagcaagttgtaatattccctcttcattgngcgttggattacaaaaacacattgacttctccctcaaatcgccttcggtggtggtcgtcaggacgttaaagaggaagacttgagaaaggatcagcgtgntcactgccgaggaaaagagataactttcacatttaatgttatttttcataataaacaaatcgcaaaaaaaaaaaa

SEQ ID NO: 1614 - DNA, 635 bp, Ctenocephalides felis
  misc_feature (417)..(417): n = unknown
  misc_feature (432)..(432): n = unknown
  misc_feature (451)..(451): n = unknown
  misc_feature (491)..(491): n = unknown
  misc_feature (500)..(500): n = unknown
  misc_feature (513)..(513): n = unknown
  misc_feature (518)..(518): n = unknown
  misc_feature (535)..(535): n = unknown
  misc_feature (557)..(557): n = unknown
  misc_feature (568)..(568): n = unknown
  misc_feature (570)..(570): n = unknown
  misc_feature (574)..(576): n = unknown
  misc_feature (578)..(578): n = unknown
  misc_feature (590)..(590): n = unknown
  misc_feature (593)..(593): n = unknown
  misc_feature (595)..(595): n = unknown
  misc_feature (611)..(611): n = unknown
  misc_feature (613)..(613): n = unknown
  misc_feature (621)..(621): n = unknown
  misc_feature (625)..(625): n = unknown
gtttggacaagatgcgaaagcaggctttctcatctgtatgtctgttcggtgaagacaataacagcagcatttctggtgtttgggtatggaggggtcaggaattagcattcaatctttcccctgactggcaaattgactacgaaacctacaactgggtcaaattggaccccaaatcagaagagaccaagaaattagtcaagcaatacttctcctgggaaggtgccgataagaacggacgcaagttcaaccaaggaaaggtcttcaaataaaattcaactaaagaattgccacttttgttaatatttcaagttattgtaatcttatcctgccacaatattgttatttttatagcaaaatgtttgctgatgatggcatgttatattaaaatttcttgaaataaattatttaaaatctaanaaaaaaaaaaaaaanaaaaaaaaaaaaaaaaaantgggggggggccgggccccaatccccttatagggagtggntaacattcnctgccgcgtttanaacgngggatgggaaaccctgngttcccaattatgccttgaacnatccctttccnantggnnnanagaaaaggcccnccntncttccaaattgccacntnatgggaangaanttgagcttat

SEQ ID NO: 1615 - DNA, 641 bp, Ctenocephalides felis
  misc_feature (5)..(5): n = unknown
  misc_feature (572)..(572): n = unknown
  misc_feature (577)..(577): n = unknown
  misc_feature (633)..(633): n = unknown
gtttnagtattttttgttatttcttgacttgatcatctgttcgataagttaattctgtaataatgaaaattactagatataagaaagtacatcgaaatttgaacttttatattaacaattttggttttcatcagccatttcaaatacttattgacggaactttctgtttcgatgcgttaaagaatcaattcaatattcaagatcagttaaagaaatattttcaagctgagcttaaacttttaactacgcaatgtgtaattgtggagacagaaaatttaggacccaaattggttggtgccatgaaaattgtaaagcaatttggtattcacaaatgcggacatgaaaaggctccaattggtgctagtgattgcttactatcgatggtaggcaaaagtaatagagacagatatgtcatagctacccaagatcgtgatctacaagaaaaaattcgggaaaaacctggtgtgcctctattgtatctgcatcgtaaagcaccatgttagagcgcctcacaactagccgtgataagctctggaatgctctggagctcaagtccaacaagggagacttgnataanaataaagagagtggttatcagaaacacatgacagaaaggagagaagaaaagaaggnctatcttt

SEQ ID NO: 1616 - DNA, 636 bp, Ctenocephalides felis
  misc_feature (578)..(578): n = unknown
  misc_feature (586)..(586): n = unknown
  misc_feature (613)..(614): n = unknown
gcattataccgccaattgttgttcactgctccagactctttgggtgaccacatatctggtgttattttgttccacgaaaccttataccaaaagactgatgatggcactccattcgtagaacttttgaaacgcaaaaacatcatcccaggaatcaaagtcgacaaaggtgtagttgacttgatgggcagtgagaatgaatgcactactcaaggattggatgatttggctgcccgctgtgcacaatacaaaaaggatggatgccactttgccaaatggcgttgtgtattgaaaattggcaagaatacaccaagctaccaagctattttagaaaatgctaatgtcttggccagatatgcctcaatctgccaatctcaacgtttggttcctattgttgaaccagaggttcttctgatggagatcatgacttggaacgccacaaaaagttactgaaaccgtttggctgtgctacaaagcttgaatgaccaccacgttatttggaaggacttattgaacccaatatggtactgtggcaaagtgcccacaaaaccacccagcagtgtaggagttgcctgggctgnttgagganactgtccactcagtccggattcttctnntgagacattgaaaaaagctatc

SEQ ID NO: 1617 - DNA, 650 bp, Ctenocephalides felis
  misc_feature (4)..(5): n = unknown
  misc_feature (581)..(581): n = unknown
  misc_feature (610)..(610): n = unknown
  misc_feature (635)..(635): n = unknown
  misc_feature (650)..(650): n = unknown
aacnncttaaggaaaagcaagctaagcgcaaggtatcccgcgctgaagaagaaaagcgtatggcccaaaggaaaaaggaagaagaagaacgcagaataagagaaattgaagaaaagaaacaaagagacattgaagaaaagcgtcaacgtctcgaagaagccgaaaagaaacgccaggctatgcttcaagccaccaaggatgccaacaagaagggccccaacttcaccatcaccaaaaaggacagcaacttcaacatgtcttctgcccaaattgaaagaaacaagaccaaggaacaattggaagaggaaaagaaaatttctctgtccttccgtatcaagcctctggatatcgaatctcttagcgttgaaaaactcagacaaaaggccaatgaactttgggaatgcatcgtcaagttggaaactgagaaatacgatctggaggaacgccaaaaacgccaggactacgatcttaaagaattgaaagaaaggcagaaacacaactcagacacaaagcattgagaaaggattgatcagagccctacaggaaaatccccccaaatcaagtcgctcaatatgagagcngtcgcacagacattgagatagaaaaattnttgaggggctaaactaaacaagagncttgacgttttgccn

SEQ ID NO: 1618 - DNA, 642 bp, Ctenocephalides felis
  misc_feature (4)..(4): n = unknown
  misc_feature (588)..(588): n = unknown
  misc_feature (619)..(619): n = unknown
gccntgtagcaccaacaaacttttcaaaatctacacgtcattatgaaattttcaaattaaaaagtgttcattaataattatagtgtattatataaatattagttctaatctattgttattaaaatggttctcttaggcaatgatgaatttttatcaaaacttacaaaaatgtttcaaaatgccagaagttcttcatcggttaccttaactatgaaacgatatgatggaagaactacaccttaccctagagaaggcaggccccctttgcccaaaccagatgagcatttatgtctgttaagagccgtacacaaatcaaaaagatttcgactgtaattaaatcgaaagacgcagtgaggtttcacatagcatattgcagtttattaaaaggtaatatggatggtttgaaaaagatgaaaaaagtcaaaccaaaagtgaaagcgcatagacctatttatttaatggtgggtttgtaagtgagcaagaagatttctttcttaaatttatatgtgatgcgagatgaatgctggtcagaaccttatcattttcgatctgtcacttaatcgctaagtattaacccttattaattcnttgatattggatggatattttgaaatagatntgtttatttaaaaaaaaaaaacc

SEQ ID NO: 1619 - DNA, 646 bp, Ctenocephalides felis
  misc_feature (493)..(493): n = unknown
  misc_feature (587)..(587): n = unknown
  misc_feature (642)..(642): n = unknown
gtttcgtaataattacgtatttaaaaaaaaatattttaataaacatgtactcattaagaatattttcaaaacccgttaatggtcttgcaagatttagtagttcctataacgctacaagaccaaatctaaaattaaatgagaatactaaagtaatttgtcaaggatttactggtaaacaaggaacttttcattgtaaacaagctatagaatatggcactaaaattgttggtggagtatcaccaaaaaaaagctggaacaattcatctcgatttaccagtattcaaaacagtaaaagaagccaaagatgcaactgaggctactgcttctgttatttatgtaccacctccaggagccgctgatgcaattctggaagcaattgaagctgaaatgcctctaattgtttgcataacagaaggtgttccacaacatgacatggttaaagtaaagcatagactattaaggcaaaacaaaagccgattgattggcctaattncctggaatattgacctgactttgcaaattggattatgcctggcatgtcacaacgaggaaaatggaatgttctcggctggactttgcatatgagnagtaataacacctagtgggctcgccaaccttggtggaatagggagacatttatgnctgt

SEQ ID NO: 1620 - DNA, 643 bp, Ctenocephalides felis
  misc_feature (557)..(557): n = unknown
  misc_feature (575)..(575): n = unknown
  misc_feature (595)..(595): n = unknown
  misc_feature (617)..(617): n = unknown
attgtctgtacaatcgccaaattgtggttgatataagaagaattacaattcttcgccatgacgtcgaaggtttcccgtgacactctatacgagtgtgtcaatgctgtattggattattcaaaggaaaagaaaaagaagttcttggaaactgttgaaatccaaatcggtttgaaaaactacgatccccagaaggacaagcgtttcagcggcaccgtaaagtatgtttacctgacatgaatttaatttgaggtttttaaagtcaagttatactggtaacctcaagttttattctgataaatcaggaagccaaagttatctttggcggacctgcacccagggtcttaaataaattggggaggcatttgccgaaccttttagctttctattcaaagtcgactacttgctgcatgaactacttagtagtaggtaagccaagtaacagtcataatttagaaagtaaagcaatgaggcaaatgccttttgatcctgcgggaataagtttcaccgattaaattgaactatcaattaactttctttgttgtagatgagcacattcncgacaaaatgcagttgtntttgggagatcacagcatgngatgactaggcacatgtcatgntgatgcgacttgaaactaacagacaa

SEQ ID NO: 1621 - DNA, 639 bp, Ctenocephalides felis
  misc_feature (3)..(4): n = unknown
  misc_feature (565)..(565): n = unknown
  misc_feature (612)..(612): n = unknown
gtnnttttgcctggattatttaattagaagactgttaagttttagaagatatgactgtagtttaacagtttatacgttttataaatcagcttctgaaactttaatttcataatgatttctggcgattttcctgaggacccagaaaaggagctgcagagtttagaagatgatgttgttcaagaaattctcaaaactggcactgatctgagacaatactcgaaacaaatagaaaaagaactgaaagatgtagaaaataaatctatacaggattatattaaagaaagccaaaatatagctagcttgcacaatcaaattggggcttgcgatgacatccttgaaagaatggaagatatgttaatgagttttcagagtgttttaggtaatatcagttctgaaataacgtctctacaaaaaaaatctgttcaatgtcattcaattatcaaataggcaggctgtccgaggagatctctcacagttatcgaagatatttctgtactcaaagctgtaccggatttggatcccagtactgagaaagaattatactcagtacaatctcatcccaganagttgtaaagaccacattcaagagccaacttgcatgtgtaggtgtcngagaactgaaataagcatgcaaaataa

SEQ ID NO: 1622 - DNA, 635 bp, Ctenocephalides felis
  misc_feature (4)..(4): n = unknown
  misc_feature (606)..(606): n = unknown
  misc_feature (611)..(611): n = unknown
  misc_feature (613)..(613): n = unknown
  misc_feature (632)..(632): n = unknown
aacnatacaacaatcgatacgagacccgaagtatacgatataatcaatctaaagtctgaaacagttacaaaaacgggcgatgaaacaggacagtccgcggacattgatgtgcccgacaatggcgacgatgaaaatcttgacatgaaaatcgaagcggaccgactgaaaacattcgaaagatggccagtgagcttcataagcccctcggtactagccaaatcgggattctattatatgaaagtcgacgacagagtcagatgcgagttctgcaaagttgaaattggcagatgggaacaaggtgacgacccctccgtcgaccaccaacgttgggctcctaattgtccattcctacgcaacaggcctgtaggaaacgtgccaatagaccctccgagcacgtcccgagacccggaccgagctacgacgtatgcggcctttgaccatacgtccaacgcgtccagaaaaccaaaacctagcctacctgtcaccaagggcctgaatcccccagtacgcatgagcagcacgcttagatctactccatggccggcagttaaagacgtcaggagaactagtgaagagctttttaccaggcacgaacgaccttgttcntgggngnggtaaagatggaccggatntct

SEQ ID NO: 1623 - DNA, 641 bp, Ctenocephalides felis
  misc_feature (462)..(462): n = unknown
  misc_feature (502)..(502): n = unknown
  misc_feature (519)..(519): n = unknown
  misc_feature (530)..(530): n = unknown
  misc_feature (569)..(569): n = unknown
  misc_feature (617)..(617): n = unknown
  misc_feature (640)..(641): n = unknown
gaattatttctttgtggctgtaaaagactgcacagctgctctacttcaatcaccggctgattaaaaaaaacacgtgctgaaaatggcttcgaaagtagcagcaaagaaaggcccagtccaaactggcaaaaaacaacaacttcgcggaaagggattgaagaaaaagaaggtatctcttaaatttaccgtcgactgcaccacccccgtcgaagacaacattatggatgtacagaacttcaaaaaatacttgcaagagaggataaaggtcaacggaaagaccaacaactttggtaacaacgtctcgttggagtgccaaaaaatgaaagtgtctgtcatctctgatatccccttctcgaaaaggtgccttaaatacttgacaaagaagtatttgaaaaagaacaacttacgtgattggattcgtgttgtcgatggtggcaaggactcctatgaattgaggtcttncagatctcatccaagacgatgatgatgatgaagatgttgnataatgtaaatatcttntgatataaatntaatattaaaaaaaaaaaaaaaaaactcagggggcccgncccattcgcctttaggagcgatcaatactggccgcgtttacacgcggntggaaacctgctaccacttatcnn

SEQ ID NO: 1624 - DNA, 407 bp, Ctenocephalides felis
tctccatataaaaccttaaatctttcaacaaaatgatgaagtagctgctgagcataatctaaaagatcatttaataacgtgttgctacataaaattttaatagcaatatgtaaagtaagaaaatttttatagaaagtcatttgaaatatgacatgagatttcaaaactactggaccactatacaataataattgtctaaattctgtagctttccatggtctcacatatttcaatgatcgaggattcctagcaaagtccttggatatataaatctttaagctgcataaaaaattggaaaagtcattagttttagcacatggcaaacgaattggaagctcaccttcagtccacaaaagcatcaatctcttaactgctcctaaacaaatcaaattcatatagtcaagtgg

SEQ ID NO: 1625 - DNA, 345 bp, Ctenocephalides felis
  misc_feature (5)..(5): n = unknown
  misc_feature (7)..(7): n = unknown
  misc_feature (14)..(14): n = unknown
  misc_feature (54)..(54): n = unknown
  misc_feature (105)..(105): n = unknown
  misc_feature (118)..(118): n = unknown
  misc_feature (136)..(136): n = unknown
  misc_feature (147)..(147): n = unknown
  misc_feature (190)..(190): n = unknown
  misc_feature (250)..(250): n = unknown
  misc_feature (279)..(279): n = unknown
tcatngngcatganttatgtgctttcagcgtgaatttattcagtgccaattatnttcacttacagaaaagattctcaatcttgattattctaaatttccgattangaaaattactcangtagaacttattacgggngccacaaaatnttccggttatttaagggatgattgtatattaataaacgcattngtcaaagcagagctctcattcatgataagtcgataaaacataaaaaaatgtgagtcgatntcaaccctcaaacttacatcttttagtgngggtatggagctatgcaaaggaaaatctttgcaattagatgttcaaataaatctcgtttactggtg

SEQ ID NO: 1626 - DNA, 77 bp, Ctenocephalides felis
cgaacaactttcgacaatcttattgctccgcttcgcaacatgattaatggcagtttttactttacggtaagtgtgac

SEQ ID NO: 1627 - DNA, 285 bp, Ctenocephalides felis
gtattgaatttttctttctcattctgaaagtattctatttcggatggagaacgaatgctgcttggcaaaatcattgattatattataaatcatacgaacaaatttatctcgaatatttattatagcgtcatattgatctaataaaagaaaaaaagcagttcaacataaaaatattggaaaaagtgctatcattgcaaaatatccaagtattgcttataatatcgcaattatatgtataaacttcgcaagtcgagtgcaacgtttaacgtaagcgcggtttgtggt

SEQ ID NO: 1628 - DNA, 436 bp, Ctenocephalides felis
tcgtaattaataaaattaaacttaaaaacgttcaaacgctatcaaataatatatattttgttctcaagtgaaaattgcctttttccagcatatttacataaagattcattaatattagagaaattttaataacaaaaaatatatcaaatatttgtaggccaaccgttgagttacttcctgaaaaagctgcgttgttaaaaagaatcattaattcatcacaacagctcatacgactattaggctctgattactggtcaaagaaagcaaataccttgatttttttttaaatattttgtctttttaccttttgttaaaaataaagaaatatattataaaattatattaataattttccggcaaagaattgttattttgctgtaattttacattttgtaaggcatttttggctaatattccgatcatgtcagagagcaga

SEQ ID NO: 1629 - DNA, 103 bp, Ctenocephalides felis
gagtgctacgatatatactttcattgtatttatttatctggaatctcggcacgttaatatcgtctcaaattgagtagatttccgttgctatctttgataaatg

SEQ ID NO: 1630 - DNA, 436 bp, Ctenocephalides felis
ggcttttcaaagcgctttgaatatcttgatatcaaaaataatatctgtaggtgtatctacttgtgcatcagcaaaatattttctagagtattttagtaaacaaatgtgggcgacgtaattttcttggattattaattcagatctgtttcatattttagattttttattattacaatgagataagtgatttgaatactttgttataaatttctataacctcattaaatttacgaatatttcctcaatcaacatgataaaactcaccactggatatctaatctttttgttctaactttatgcatatttgtcatagtaattactaactgtttattattaaagaaatagatagtaatttcatcttgagaaatgaaaaataacttcgtgataaataattctccagatatttccacttggaaacattttggctctttcaagt

SEQ ID NO: 1631 - DNA, 281 bp, Ctenocephalides felis
  misc_feature (4)..(4): n = unknown
  misc_feature (6)..(6): n = unknown
  misc_feature (13)..(13): n = unknown
  misc_feature (17)..(17): n = unknown
  misc_feature (68)..(68): n = unknown
  misc_feature (130)..(130): n = unknown
  misc_feature (137)..(137): n = unknown
  misc_feature (143)..(143): n = unknown
  misc_feature (148)..(148): n = unknown
  misc_feature (202)..(202): n = unknown
  misc_feature (225)..(225): n = unknown
  misc_feature (543)..(543): n = unknown
  misc_feature (549)..(549): n = unknown
aatngngactttnttgnttctaaaaatctgataaaattttaaataacttgaagattaaaaagcttttnaaaattcaacatacaaaaaaatacatgcaaaagcaaatatacaattttaaaaaacctgcaantgtgggncaacancactnattcaacattcaccctgatctttcattctttgattttttataagctacataaantgccaattctttcttttctttgntgatattacgagtatcgtattccaatctgtgcattattatgcgttcaacaagtcgt

SEQ ID NO: 1632 - DNA, 549 bp, Ctenocephalides felis; identical to SEQ ID NO: 883

SEQ ID NO: 1633 - DNA, 549 bp, Ctenocephalides felis; identical to SEQ ID NO: 884
  misc_feature (543)..(543): n = unknown
  misc_feature (549)..(549): n = unknown

SEQ ID NO: 1634 - DNA, 549 bp, Ctenocephalides felis
  misc_feature (498)..(498): n = unknown
  misc_feature (501)..(501): n = unknown
  misc_feature (503)..(503): n = unknown
  misc_feature (506)..(509): n = unknown
  misc_feature (512)..(517): n = unknown
  misc_feature (519)..(520): n = unknown
  misc_feature (524)..(524): n = unknown
  misc_feature (546)..(546): n = unknown
agttacagctcctgttaatgctttagctgaaacaagtcaaacttcatcaatatttggtggtgctaaaccacgggaagaacccactgagaaataagttatcaagttttaacattaattattaaccaccatatagaataccatcttgaatcatgtaataatttttcgattaaaaattctgcaaaactcataacaggcgtcgataatcttactcttgcaataaattctttaactgatatataaaatgtatcaagttttgtaaaagaaaaatcaataattattgatttacagaataaaatatttattttgtttaaaaattgactaatactttgtaataatatgtaattcttatatatatagattaaagagttgttgttagtgtcttttgttttcaaatagttttacactaatatatttaatacaaaacgctttacaaattttacaataattgatgaaaactatttgagattttattctcgaagtacaacttatgtattaaanaangngcnnnntgnnnnnntnncctngggggggggccggccccattcnccc

SEQ ID NO: 1635 - DNA, 549 bp, Ctenocephalides felis; identical to SEQ ID NO: 886
  misc_feature (4)..(4): n = unknown
  misc_feature (518)..(518): n = unknown

SEQ ID NO: 1636 - DNA, 549 bp, Ctenocephalides felis; identical to SEQ ID NO: 887
  misc_feature (546)..(546): n = unknown

SEQ ID NO: 1637 - DNA, 549 bp, Ctenocephalides felis; identical to SEQ ID NO: 888
  misc_feature (492)..(492): n = unknown
  misc_feature (511)..(511): n = unknown
  misc_feature (521)..(521): n = unknown

SEQ ID NO: 1638 - DNA, 549 bp, Ctenocephalides felis; identical to SEQ ID NO: 889

SEQ ID NO: 1639 - DNA, 549 bp, Ctenocephalides felis
  misc_feature (516)..(516): n = unknown
  misc_feature (545)..(545): n = unknown
ccccttccccccttccccacaaacatcacgtgtatttttagttatgaaaaaaaattgtaattattttgatttttggatttttttaaaaaaaaattctctctccctaaaaacatcacctgattaatggacgcatcctatttgtattccttatataaaaataaaaaatgtgaaatttagatatactgaatgattactcgtaccaagagtcgaaacatataaataaataatataaaaatcaatttaccattttcaaatttgatgaattggttgcaaactataccaaattcctcaattccaatcatattcatatacaaaaatacctatcaaattttccgattcatttaaaaccgattacaatcaattccattaggcaccagtatttataaataaaattttgcgcatatgtgtgaacatatattcattattttattagtctgagaaatagatgttgactattcgagagagcagcgaaatgtcgatatttgccacctcatcagatgttggataaccaaccgntaataaccgatttttagggggatgttaangcct

SEQ ID NO: 1640 - DNA, 549 bp, Ctenocephalides felis; identical to SEQ ID NO: 892
  misc_feature (479)..(479): n = unknown
  misc_feature (528)..(528): n = unknown

SEQ ID NO: 1641 - DNA, 549 bp, Ctenocephalides felis; identical to SEQ ID NO: 893
  misc_feature (455)..(455): n = unknown
  misc_feature (522)..(522): n = unknown

SEQ ID NO: 1642 - DNA, 549 bp, Ctenocephalides felis; identical to SEQ ID NO: 894
  misc_feature (401)..(401): n = unknown
  misc_feature (530)..(530): n = unknown
  misc_feature (548)..(548): n = unknown

SEQ ID NO: 1643 - DNA, 500 bp, Ctenocephalides felis
  misc_feature (172)..(172): n = unknown
  misc_feature (187)..(187): n = unknown
  misc_feature (192)..(193): n = unknown
  misc_feature (198)..(198): n = unknown
  misc_feature (203)..(203): n = unknown
  misc_feature (213)..(213): n = unknown
  misc_feature (217)..(217): n = unknown
  misc_feature (221)..(223): n = unknown
  misc_feature (225)..(226): n = unknown
  misc_feature (235)..(235): n = unknown
  misc_feature (241)..(241): n = unknown
  misc_feature (246)..(246): n = unknown
  misc_feature (258)..(259): n = unknown
  misc_feature (261)..(261): n = unknown
  misc_feature (266)..(266): n = unknown
  misc_feature (269)..(269): n = unknown
  misc_feature (271)..(271): n = unknown
  misc_feature (279)..(279): n = unknown
  misc_feature (285)..(286): n = unknown
  misc_feature (292)..(294): n = unknown
  misc_feature (303)..(303): n = unknown
  misc_feature (308)..(309): n = unknown
  misc_feature (321)..(321): n = unknown
  misc_feature (332)..(335): n = unknown
  misc_feature (340)..(340): n = unknown
  misc_feature (345)..(345): n = unknown
  misc_feature (355)..(356): n = unknown
  misc_feature (361)..(362): n = unknown
  misc_feature (368)..(368): n = unknown
  misc_feature (384)..(384): n = unknown
  misc_feature (390)..(390): n = unknown
  misc_feature (394)..(395): n = unknown
  misc_feature (399)..(399): n = unknown
  misc_feature (414)..(414): n = unknown
  misc_feature (429)..(429): n = unknown
  misc_feature (432)..(432): n = unknown
  misc_feature (436)..(436): n = unknown
  misc_feature (438)..(438): n = unknown
  misc_feature (444)..(444): n = unknown
  misc_feature (458)..(458): n = unknown
  misc_feature (461)..(461): n = unknown
  misc_feature (474)..(474): n = unknown
  misc_feature (477)..(477): n = unknown
  misc_feature (489)..(489): n = unknown
  misc_feature (492)..(493): n = unknown
acatcaatgcaagagaagacaccaacaaaaaataacgaatataaatcgaaatttgcgaaattaaaaattcgtgatgatcagataagttacaatattttgcaattcttttaaagtaaatatccaaagttttaacattataaaattaaaaaaaaaaaccaatggggaatttggnttaaccaatttttgnacctnnaaagnaattnttttttttgnaagnaccnnntnnaaattttgnttgggnccaantaaaaaaaccgnngncaggnatntnttttttcntacctnntggatnnnttttacctnttacnntggtttttaacntattttaaaannnntttgntttcngaggggttanntttannaaatgncttaaaaattttaatnttttcntttnnaggnttttttgggggaacnttttttaaaacctcnttnttanantattcnttggaacccgtggnaancatttgggtttantanttaaaggatatnggnngggtttt

SEQ ID NO: 1644 - DNA, 500 bp, Ctenocephalides felis
acacatagcaaattaagtcttcgcttggatttacatgaaaattgccaaaaaaagaatacattcattataggaagtatttattcaagtattttttgatgactgttctagctgttcatcaattcatacttaaaatagttaccctttttaatttttacagtatttaaatttaatagttggtatagtattttataaattttaatttgaagcattcctttataggtttggaaattatatttttacaaaaaaaaataacccgtccaattgattttaaacaaaaccataaaaaactaggtgctatagtaaacagcatttgatttgatgtatacattgcattgaaatgagtggagaagcaagatgaaagcctatccattaatgacttaagactttttagaaatgttttatatatacatatgtatgctagatatttagatggtgtcttgtaattgaattagatttacaaggaaccaaatgttctacattaaaactaaatttatctctat

SEQ ID NO: 1645 - DNA, 500 bp, Ctenocephalides felis
acagttttttttttcctcaaacacgagctattggaaaacaaaattaattaagtttagttgaaagtcaaattgacccatatatatatatatctagttttgatatttgtcttacagattatggttgtcgatttatatatgtttttattgaatacttgtgatgtttattattgatttctttttgtttgttgttcatcaacgttctttgttaacaaatgggggaatagctagttaggaacccaagacgtcatatatctggccgaaagcacaattactgaaggcacacacccacaactacagtctacgctcaaattcatattaagtaaaccaggctctggacgtgcggccaacaattatggataccgctacggggacctcaaacatcgttggaaagtagcaacaatttttagagccgagggcggctctggtgtgacaggggggcgtgtgacgataatcataattatcgcgtattgataattattgtcgctgatggtcgcaacccc

SEQ ID NO: 1646 - DNA, 277 bp, Ctenocephalides felis
actgaatgttacaaatttttacttggatagaaggagcaattttcgttgccctcgaccggcgtttcgccagaatttaataattgtttattttattgcatttaatcctctttttttaaaatgatgcatattataataatatacttttaaattattattgatacaacttttttgcaaaccaaaataggtatgatcttttaataatttttatcccatttaaaaaaaattctattcaacaaatatctttttttcaatgcaactaggattttatatgttaagt

SEQ ID NO: 1647 - DNA, 500 bp, Ctenocephalides felis
acttaagtaatatgttagtaaatttatattaggaattatgacaaattttgttatattagaacttatatatattaggctttacaaaaatgttatttggatgaactattttatctattagatttacttaaacattatagagataggaaaaaatctcttaaaccattttgctaaaactttgagaacgaaaaaataaaacatctacaagacatcaagtcttttcttttaaaagagtaacactcgaaaagggagcgttcattcttagaccaaaagaactacaaacatattatattttataatatagaattattaatagtagtatttttttactaatataaatatgtttaatttcaggttattttgactcgtcatcctatcaaattagtcaagaaaataacgtcaacagaagtcagaaaagaaccaaaaaatttttctgctcaagtgcaaaaagggctacacttattcacgtggttgcaacaccacataaaatacgaatgtggcaa

SEQ ID NO: 1648 - DNA, 331 bp, Ctenocephalides felis
acagtagattgttttgaaatcggtgccgtcccgtaagtgttaaatatatgtaagcaaaatgattttactcaccaatacatcataccccatgcaaaaatacttttatagagtaatgcaacacgcttacctgaaacaaaataaaaattattaaatacattgcaaagaaatatataaggtcatgaagaaaaattttatgtaacgcaataattatatgtagtagcagtcttacaaaaatatgtattaactaacaatatcaatagacaattatttaggggccaattctgctgtaaaatagaccaatgttaagtaagggcttctcatacaaaattgt

SEQ ID NO: 1649 - DNA, 113 bp, Ctenocephalides felis
  misc_feature (15)..(15): n = unknown
  misc_feature (18)..(18): n = unknown
  misc_feature (44)..(44): n = unknown
  misc_feature (95)..(95): n = unknown
acgagttaataaacnttnaaatataataagtaacattttaaagntgcatcttagtgaaaatctttaccatgttccttgaaaataataaaacaaantaaacatttgtgccatgt

SEQ ID NO: 1650 - DNA, 474 bp, Ctenocephalides felis
  misc_feature (266)..(266): n = unknown
  misc_feature (268)..(268): n = unknown
acaggaagttccagcaatttgccttaaggcacgatgccatacgccactagtttttgttagttgtatgtttaattatgcattaatcaaataattttttcatagttcaaaaccagacggtttttttttaaaaaaaaaaaagaattataaaaaaatatgttcaatgtgacagccagttgtgttcatgcaaggcgacggaaagagcactcgtgtcgagcaagcgatttgcccgctacacatatcagtttggtctgacgagtatttttacngngcccgcctatagtgtgttaatatgatgcaattcagtcattatcaacacgagacagtctaataaaatttatttaattttagctattatatcaattaaaaataactatacgtctctatttatttttgttccggttactagaaactggatgaaatatttagtcatacttttaagaagtaacacttccaatatggacgaatttttggggt

SEQ ID NO: 1651 - DNA, 500 bp, Ctenocephalides felis
  misc_feature (33)..(33): n = unknown
  misc_feature (165)..(165): n = unknown
  misc_feature (241)..(241): n = unknown
  misc_feature (258)..(258): n = unknown
  misc_feature (365)..(365): n = unknown
  misc_feature (430)..(430): n = unknown
  misc_feature (465)..(465): n = unknown
  misc_feature (476)..(476): n = unknown
acatacacacagatatacatacatacctacacnaacacacacacatacatcatttttttcttaggtatgccaaaatgttcagagggctttgaaacgtaaagatatgtaaaaaatacattttcattttgttgcgaacataccctactggaagtaaataaaaatgcntgaatcaagcacagtaatgggaaaaaattaactaaaaggttagttatcgtataactaaattaaatcaaagggctgntttattatttacagttnctcaactacaaactatataagtcaaactcaaaaaactataaatacttattccaagaaattaataaacttttaattcaatgaataataaaagcatttccctattattngcttcaataattattataaactattaaaaccatttatacattgtttataacttacaagaaagcancttaataaacttgaaatctctaataaacaacattngcaagactttntaatccatcaaaaaatacttgaca

SEQ ID NO: 1652 - DNA, 500 bp, Ctenocephalides felis
  misc_feature (301)..(301): n = unknown
acatgctaagtatcaaggatgacgctgtatgtgaaaaaagtgagtgttttccgctttcctgttgaaatctttcttcaattttctttgctacaaacttcacggagttcgagacctttccaacgaatgcaaaagattcgtgcgttctggagttatatcgtcaggaaggaaaacccgtcttatttttatataatagataatatatactatattattatagtaatcgggcgtaacatcaataaaaaacatgaattttagtgttaaattagaatattaactaatttttcgactgaatgagggctangaatggaggcaacatatggatgtgaaaaaactagtatgagagtttttagaatttttttaaaattcatatgcttccactagcatagccttcattcattggcaatcaatttaactgtaaaaattaaaaataaataattttttattaacattattgtttttttatgaaactccttacatattatttatttagttttaatttt

SEQ ID NO: 1653 - DNA, 226 bp, Ctenocephalides felis
  misc_feature (65)..(65): n = unknown
acttaaaaataatttctataaactgttttagattggaaacttatgcactaaattaaaaatattgnattgataataaggtgtgattgcgattttaatataaaacctcacttaacctagaattaagtttatacattatacacatcagacttgcttaacagcaactattaaaaataaatcaaatatggtatatcaaaaatgatatcaaagtaaattggcatatcaaagt

SEQ ID NO: 1654 - DNA, 500 bp, Ctenocephalides felis
  misc_feature (50)..(50): n = unknown
acattttaaattaaatctctaaatgtatattttttattaatattatttgntatctatcatatgaatgaattattcgtaattgtcatatacgcttaactatttctgtttgatcaagcttgattttaaaattttgagttattatatttctgtgttcattcactacatatgtattatagtttctctacacttgtctgcaaaatcattcattaaattataactcatatccaatacaaatgatatgtttgtatttaaagaactgacatctcgaaacgcaaaaatttaccaagatgaccaataatatttctttcattttcttattatgaagaatcattatttgtggtaatttaattttgtatgataaccattgtgatcaatgctgtaacatttgttaacaattaaattatatagtttatgttgtatacatttagacctgtaagaagcgatatttaatattattttttataatttgttaatcttacatatatagataaatattatgt

SEQ ID NO: 1655 - DNA, 500 bp, Ctenocephalides felis
acattctgaacaaactagataaaatgaaaatcatgatatcagttttattcttgttcttagttttttacgtaggatttaacatatcaacttctatttaacttttccaagtttcgtctttaaataaagtttgttatcggcaaacacaagttttaaagagaattattccgtttgtctatttttactagaatacttttttagtgtaatttgaagtagtaagtagtatcttggaaaaagataaatttaacgtcctttgtaatcgacatattaatatcgaataaatttgatactgatgaagtattatttgttagcagaattttccaataattagtttaccataatttattaactgataatgcacacaattttttaaaaatatactttttaaaattaaagtcttcaattatttcaaaatagttcaatactcaatctaataataaatttaactgttattcactatcctgccacgatttttaaattaggcttcgttaaattcaattttg

SEQ ID NO: 1656 - DNA, 343 bp, Ctenocephalides felis
  misc_feature (77)..(77): n = unknown
  misc_feature (82)..(82): n = unknown
  misc_feature (112)..(112): n = unknown
  misc_feature (167)..(167): n = unknown
actaatttttttaaacatttttttaccctctggcaaatatttccctaactgtaatgtaaaaattgttcacaaatggnaattngcctgtcattcatgttcgaacgttttaatngcatgtttgcatttgcaacacgagaatcataattctcttcttgataatttatttntatgtcatttttagtcatgaaaatgaaatatataatttgtaaataaatactcagttcatacacgataatgtaattataggtagtgtttaaaaaaattagcgactgtgaacaagatatcaaaaaaatacacatttatttatttcactatccaaagttttcttacagtcctctcctgt

SEQ ID NO: 1657 - DNA, 500 bp, Ctenocephalides felis
  misc_feature (5)..(5): n = unknown
  misc_feature (7)..(7): n = unknown
  misc_feature (17)..(17): n = unknown
  misc_feature (19)..(19): n = unknown
  misc_feature (21)..(21): n = unknown
  misc_feature (28)..(29): n = unknown
  misc_feature (33)..(33): n = unknown
  misc_feature (40)..(40): n = unknown
  misc_feature (42)..(42): n = unknown
  misc_feature (45)..(45): n = unknown
  misc_feature (54)..(54): n = unknown
  misc_feature (58)..(58): n = unknown
  misc_feature (61)..(62): n = unknown
  misc_feature (67)..(68): n = unknown
  misc_feature (70)..(70): n = unknown
  misc_feature (74)..(74): n = unknown
  misc_feature (79)..(79): n = unknown
  misc_feature (85)..(85): n = unknown
  misc_feature (87)..(88): n = unknown
  misc_feature (97)..(97): n = unknown
  misc_feature (106)..(106): n = unknown
  misc_feature (137)..(138): n = unknown
  misc_feature (147)..(147): n = unknown
  misc_feature (149)..(149): n = unknown
  misc_feature (155)..(155): n = unknown
  misc_feature (161)..(161): n = unknown
  misc_feature (221)..(221): n = unknown
  misc_feature (232)..(232): n = unknown
  misc_feature (242)..(242): n = unknown
  misc_feature (256)..(256): n = unknown
  misc_feature (265)..(265): n = unknown
  misc_feature (271)..(271): n = unknown
  misc_feature (321)..(321): n = unknown
  misc_feature (330)..(330): n = unknown
  misc_feature (352)..(352): n = unknown
  misc_feature (359)..(359): n = unknown
  misc_feature (363)..(363): n = unknown
  misc_feature (367)..(367): n = unknown
  misc_feature (370)..(370): n = unknown
  misc_feature (384)..(384): n = unknown
  misc_feature (386)..(386): n = unknown
  misc_feature (396)..(396): n = unknown
  misc_feature (400)..(400): n = unknown
  misc_feature (432)..(432): n = unknown
  misc_feature (446)..(446): n = unknown
  misc_feature (469)..(469): n = unknown
  misc_feature (482)..(482): n = unknown
  misc_feature (487)..(487): n = unknown
  misc_feature (489)..(489): n = unknown
tcaantntgaactgcantngntaactgnntttnatgatcnantcnattgaaaanaaangtnnctaanntnaaangggcntgacgncnnctgtcttcncattatgtnctatgctcatcagtttataagttaaagttgnncacctctcntntatagnaaatanatgatgactattgcgaaagaagtctagactataaaaattctaacatatatatttaggtanttgatccatanactagggagngaaagacgtttaanatacatggnttccanaatagtcaacatgatttaaccacattttgtatgttataagtatgcaagcntgttgtgcntgagatcgcgaccacgacctangtgatangcanctcngtngcgaccactctaancngaattttgcngatntacatcacactggcggcgctcgagcatgcatntagagggccaattncaactatagtgagtgggaaaacnatgcagttgcccnacttntnacttgcatgac

SEQ ID NO: 1658 - DNA, 500 bp, Ctenocephalides felis
actataccggtgcttaccgtggcaagatgaacgtcccaaaacgtcgctgatcaaattaatagtcctcgtggctaatttatttattctggaaaatcgtgcgatttgtttgtgttcacaaaatttccgtttaccaaattttcctctataatgttcggagtgttggccgccacctcgatttggttactattggcatgggcagctatgctaatatttttccttccgttgatgttcgttgtgttagcagttttgccgggactgccattactgattattcgaagggtgtgctacgtgcccttcgattcgatttaaatttgatttcttcaattaaaaaatcaattttaaataaggcagtgttctttgaaatagttatttaatcgtgtcatttcatagtagttgtgatattatatttttaaacatatatcttctaatcattgataagtatgatatttatacatagtcttacatattaaggtataatatataatagatatagtcgtatt

SEQ ID NO: 1659 - DNA, 500 bp, Ctenocephalides felis
  misc_feature (31)..(31): n = unknown
actataatttcaattcaatgcatttttggtnagccaaaaattatatgaaccatttgtatgtttgttaattcaacagttattcgctctggattctttaaattcgaagtgttactatactgatgatattacaaatctactgcaattaaagattatttattcattgcaatattagtatatagtaatatttattagctctttgacaaatttgtctatcaaaataattaaaccttttcaataaatttttataagatacatagtttttatctcctctacttaataaaattacatcattatttgaattaagtggtttatataagtgcaattttacttatttacaatatttttctttgaactcattaaaataaactcaatctctaattttatgagttgtccatttagtatgaataaatatgaacagtttcttgaaggtttttgatctcggccataccattttttcatatattgtctatatacattttttacaatgactatatatcata

SEQ ID NO: 1660 - DNA, 343 bp, Ctenocephalides felis
actagattatcctgatacttttgcgccattcctttcgccatagaactagcaactaatttctcaccgggaatagcaaactgatgtgaagcaccacgaagtttagattctttaacaacttgctcattttctagttcctgcagtttattataatattcttcgcccttcttacttttgactgtttgctgccattccgtttccgcttgcttaattacttttggtctcaaatgttctggatttaattcaattcctccttgttgagccaataatgcttgtctttcttcgaaggtcttctctaattcagttcctacacgttctttttgatattgtgttaggtcgtagtcgt

SEQ ID NO: 1661 - DNA, 500 bp, Ctenocephalides felis
  misc_feature (1)..(1): n = unknown
  misc_feature (32)..(32): n = unknown
  misc_feature (35)..(36): n = unknown
  misc_feature (40)..(40): n = unknown
  misc_feature (54)..(54): n = unknown
  misc_feature (65)..(65): n = unknown
  misc_feature (69)..(69): n = unknown
  misc_feature (71)..(71): n = unknown
  misc_feature (73)..(73): n = unknown
  misc_feature (75)..(75): n = unknown
  misc_feature (85)..(85): n = unknown
  misc_feature (89)..(89): n = unknown
  misc_feature (106)..(106): n = unknown
  misc_feature (152)..(155): n = unknown
  misc_feature (158)..(158): n = unknown
  misc_feature (160)..(160): n = unknown
  misc_feature (166)..(166): n = unknown
  misc_feature (172)..(172): n = unknown
  misc_feature (185)..(185): n = unknown
  misc_feature (268)..(268): n = unknown
  misc_feature (288)..(288): n = unknown
  misc_feature (296)..(296): n = unknown
  misc_feature (303)..(303): n = unknown
  misc_feature (306)..(307): n = unknown
  misc_feature (310)..(310): n = unknown
  misc_feature (319)..(319): n = unknown
  misc_feature (321)..(321): n = unknown
  misc_feature (328)..(328): n = unknown
  misc_feature (336)..(336): n = unknown
  misc_feature (345)..(346): n = unknown
  misc_feature (348)..(348): n = unknown
  misc_feature (363)..(363): n = unknown
  misc_feature (367)..(367): n = unknown
  misc_feature (370)..(370): n = unknown
  misc_feature (372)..(372): n = unknown
  misc_feature (375)..(375): n = unknown
  misc_feature (379)..(379): n = unknown
  misc_feature (384)..(384): n = unknown
  misc_feature (399)..(399): n = unknown
  misc_feature (404)..(404): n = unknown
  misc_feature (406)..(406): n = unknown
  misc_feature (418)..(418): n = unknown
  misc_feature (423)..(423): n = unknown
  misc_feature (425)..(425): n = unknown
  misc_feature (436)..(436): n = unknown
  misc_feature (450)..(450): n = unknown
  misc_feature (454)..(454): n = unknown
  misc_feature (464)..(464): n = unknown
  misc_feature (466)..(466): n = unknown
  misc_feature (491)..(492): n = unknown
ncttgtgcaaaagcaacattttgacattatangtnngganattgaactaaattnaattataaaantatnantnantggtaaactnacantattgaacatgttaatnttatattccatgtttagcaaagaagctcctaatttaaaacaataannnnatncntgcgcnatcaanctttcttggttgngcatgaagtgtgatcattaaattataagtattctcaagtaagatctgaaaactatatcaaaaatgtataattaaactaaaaanatatatttattatataaatnttcctatngcgacantanncantttttaatntnaatgagnaatgtatnaaggtgagnntntgctcgtgcgaatgntatnggncnttnaganaattnaagaattatggtaantattntngaatggattgcnttatngnttcctaaatgncctctggttagttnaaancttgtatgantngagacacagcaacaactgttgctgnntttatatt

SEQ ID NO: 1662 - DNA, 334 bp, Ctenocephalides felis
  misc_feature (153)..(153): n = unknown
  misc_feature (174)..(174): n = unknown
  misc_feature (176)..(176): n = unknown
  misc_feature (178)..(178): n = unknown
  misc_feature (274)..(274): n = unknown
  misc_feature (282)..(282): n = unknown
acactgcaaaatttcaaatgcgaatatctcgaaaactaatagaccaagtgtcataaaattttcacagaattttactaacactattgtgcataaacactatgagtttaatcgaaatccgagatgataagactttttcatcaaaaaatttttagngtatttgatcagattcatttntnantttccggcggttttaaccaggaaagcatacgagtattaaaataattattatatggcgttatatctcgctatatgacctacaattaatttccaattnggaccctntatctgccccacacgccgagcaatcgtcaaaaaagtgagaattttttttggt

SEQ ID NO: 1663 - DNA, 500 bp, Ctenocephalides felis
acttaaaccaagaaaaaaaaaaagcttttagcctggcgttgacatatagagaccataagatcgcaacacgagaacgatgtctggacattttcgaactcacatatactagccacccgcgttgtggcgccttaaaaacgtagggatgaaatgtttacacaaaaaaagagacataaatattatcttgctgcgttacttaaatgtctatgatttgaaatcgaattctaagagaaaaggacttcaacgatatcttacccttgcaatatgatattttaaaataactttctttaaaatatttacgactatatataaaaaaaaaaaaaaataaactctactcacaagaacgatttccatgaaacaacacttaactgtataacataacttaatgtatctggcaatcatcatagatttttaaaaaaaaaaaaaaacaaattattttatgtattggtgtttacgaaaatgattatgaataacacaatacactaaacaatttcaataatgtc

SEQ ID NO: 1664 - DNA, 500 bp, Ctenocephalides felis
accgtcaatcactttataagtcctttatatacttgaatataaaaatgaagcaaattgctaataaacctttcctcaaaaacatttgatgaagagatttcgacttctcaatttagcttcacaattcttcaaatagagagtgaaattacactgtagagactaaaacagaaacgaggcttttcatattttcacgaaacaatgattacatattgtagactcatgttcggtaacatctattctgcataatcatgcgattagttgttggacacagactgtagatgtcctatactttctaagaatttttatcgaagtgcacaaactagttacattcttgaccaacaaatatattacgggcaggaacgtgaactaattattgatctgatcaatagcttttccctaatacggtgaacgtgccctattaactttatactgtaatcttgtaatgctcttactcggccataaaataatgatgtggaaacccaagactaaagcctaagcaggtg

SEQ ID NO: 1665 - DNA, 433 bp, Ctenocephalides felis
  misc_feature (31)..(33): n = unknown
  misc_feature (41)..(41): n = unknown
  misc_feature (45)..(45): n = unknown
  misc_feature (55)..(55): n = unknown
  misc_feature (113)..(113): n = unknown
  misc_feature (124)..(124): n = unknown
  misc_feature (137)..(137): n = unknown
  misc_feature (178)..(178): n = unknown
  misc_feature (182)..(182): n = unknown
  misc_feature (195)..(195): n = unknown
  misc_feature (205)..(205): n = unknown
  misc_feature (207)..(207): n = unknown
  misc_feature (214)..(215): n = unknown
  misc_feature (221)..(221): n = unknown
  misc_feature (223)..(223): n = unknown
  misc_feature (226)..(227): n = unknown
  misc_feature (235)..(235): n = unknown
  misc_feature (241)..(241): n = unknown
  misc_feature (243)..(244): n = unknown
  misc_feature (250)..(250): n = unknown
  misc_feature (257)..(258): n = unknown
  misc_feature (273)..(273): n = unknown
  misc_feature (278)..(278): n = unknown
  misc_feature (288)..(288): n = unknown
  misc_feature (300)..(300): n = unknown
  misc_feature (317)..(319): n = unknown
  misc_feature (325)..(325): n = unknown
  misc_feature (331)..(331): n = unknown
  misc_feature (341)..(341): n = unknown
  misc_feature (344)..(344): n = unknown
  misc_feature (349)..(349): n = unknown
  misc_feature (366)..(366): n = unknown
  misc_feature (371)..(371): n = unknown
  misc_feature (406)..(406): n = unknown
  misc_feature (412)..(412): n = unknown
  misc_feature (414)..(414): n = unknown
  misc_feature (421)..(421): n = unknown
acacaacatattaagctaatgaactcattgnnnaattgacntatntatattattnataactaaaagtctgggagtttacatatattaattattttataacagcttgcttaaanttgactcgttngctatgcaataantacctaattgcaatttaaagtttagatctcgaacttcacanatcntcctattaaaagntgtttacagnanttggttnnggatcnantgnntggcaaantaatantnnaatatntgtatgnnagatttaatctccantcatnatcttcatgnattcatcgaaancgacagttcctgatccnnnagtatngatttncgcgatgatnccntccangtcggacgagctgagtntgcgncgagcgctcccaagatctccttcagccgtgctggntgtgangnaaccgcnccttcgtggcgt

SEQ ID NO: 1666 - DNA, 500 bp, Ctenocephalides felis
acttgtgcaaaagcaacattttgacattataggtttggaaattgaactaaattcaattataaaaatattattaattggtaaacttacaatattgaacatgttaattttatattccatgtttagcaaagaagctactaatttaaaacaataaataaatacatgcgcaatcaatctcttttggttgtgcatgaagtgtgatcattaaattataagtattctcaagtaagatctgaaaactatatcaaaaatgtataattaaactaaaaatatatatttattatataaatatttactatagcgacaataaacaatttttaatataaatgagtaatgtattaagttgagttttgctcgtgcgaatgtttattgtttatagagataattaaagaattatgttaatgaaaatgaaatgtaattgaatattgcattaaataaattaactctgggttagtttaaaattatgtatgatttgagacacagcaacaactgtgctgcattat

SEQ ID NO: 1667 - DNA, 500 bp, Ctenocephalides felis
  misc_feature (33)..(33): n = unknown
  misc_feature (82)..(82): n = unknown
  misc_feature (170)..(170): n = unknown
  misc_feature (179)..(179): n = unknown
  misc_feature (268)..(268): n = unknown
  misc_feature (271)..(271): n = unknown
  misc_feature (290)..(290): n = unknown
  misc_feature (294)..(296): n = unknown
  misc_feature (300)..(300): n = unknown
  misc_feature (304)..(304): n = unknown
  misc_feature (306)..(306): n = unknown
  misc_feature (317)..(317): n = unknown
  misc_feature (323)..(323): n = unknown
  misc_feature (329)..(332): n = unknown
  misc_feature (335)..(335): n = unknown
  misc_feature (337)..(337): n = unknown
  misc_feature (345)..(345): n = unknown
  misc_feature (351)..(353): n = unknown
  misc_feature (355)..(356): n = unknown
  misc_feature (360)..(360): n = unknown
  misc_feature (362)..(363): n = unknown
  misc_feature (366)..(366): n = unknown
  misc_feature (368)..(369): n = unknown
  misc_feature (378)..(378): n = unknown
  misc_feature (381)..(381): n = unknown
  misc_feature (383)..(383): n = unknown
  misc_feature (385)..(385): n = unknown
  misc_feature (389)..(390): n = unknown
  misc_feature (399)..(400): n = unknown
  misc_feature (403)..(403): n = unknown
  misc_feature (407)..(408): n = unknown
  misc_feature (411)..(413): n = unknown
  misc_feature (418)..(418): n = unknown
  misc_feature (422)..(423): n = unknown
  misc_feature (427)..(427): n = unknown
  misc_feature (429)..(429): n = unknown
  misc_feature (431)..(431): n = unknown
  misc_feature (441)..(441): n = unknown
  misc_feature (444)..(444): n = unknown
  misc_feature (460)..(461): n = unknown
  misc_feature (467)..(467): n = unknown
  misc_feature (478)..(478): n = unknown
  misc_feature (484)..(484): n = unknown
  misc_feature (496)..(496): n = unknown
actatactttgacaaatagtttatcatgtaatntactagattaggatttcaaataatttataaactggatatacttctactnccaatatttgaatatgatatgaatgcatgtgtgtatgtatacttattgcatattaagatgcattaacatagaattaaatctcttggtnacgtatatntaggatatcatacatactcaaaatagtgatatttacaataaaaatataattttcttaaacctatattaaaatataaataaatagtaacnacnttaaaataacctggccatnattnnnaganttgntnttccttttatnggcccntattannnnatncntttcaaanttgggnnngnnaatncnngcncnnacttttatnaananantaannttatgggcnnaanttannccnnntggcntatnngtcnantnaatattccanggngatagcatgttgggcnngcctantcagcaaattngcctanatgggcatgttntaga

SEQ ID NO: 1668 - DNA, 500 bp, Ctenocephalides felis
  misc_feature (476)..(476): n = unknown
acatacactaagtcatatgaaatctcggcaagcgttaaaagcacaatactgtcagttcttttgaatttctaaattttaaaactttacttcgagatggacgaaaaatgttcaccatccaatgcgcctaggcaataagaaaaattccaactcttttctaacttgtttgccatcatctctcttcctttcaataagaatggaaaagttataaatttagcgtgtttttgaatatggaatagtgataaaaagtctgcattttggtgatatagtgtctttgcgtataactgcgttttgcttttgaaaaagtagttctacaagttaatagtttacattttagattgaaccggttcatcagcgtataactagtaaatcttgaataattttctgggctgaaaattttaatgtaacaaatcgacaattttttagctaaccatgaattttgaattttgaataattaaagttattttaatcgtcacgtncgcgcccactcgcttttttggcca

SEQ ID NO: 1669 - DNA, 500 bp, Ctenocephalides felis
  misc_feature (46)..(46): n = unknown
  misc_feature (57)..(57): n = unknown
  misc_feature (86)..(86): n = unknown
  misc_feature (234)..(234): n = unknown
  misc_feature (498)..(498): n = unknown
catgtcaatagttagcatatgtattaagaatttaacataataattnaaacatcaatnaaaacaatataaataaataaataattttngtatatcaataacaaatttcttaaataactaatcacatttataaccagtccattgttccttatatttatttttcaatatatcactcgtctccaattataaaactttgactagacctgataaaatattttatacataaaaatactttgnttatatcaccaatagttaaactttaaaataatttcataatcacaagtgctatgatattaaattagaagcatttaatttatataaacatattaatagtaaatttattatgaaacttggtaaagttaataaatacacattaataaaattcttttccaatatatgcttttttcttcgaaatgcctttcgatgaatatacattctaagcttctttccaattcgtatccgtccattctatcctctgacacaaaattaatttcattcccntc

SEQ ID NO: 1670 - DNA, 500 bp, Ctenocephalides felis
  misc_feature (1)..(1): n = unknown
  misc_feature (455)..(455): n = unknown
  misc_feature (476)..(476): n = unknown
ncaaacgtgaccatttttcacgtgacggtgcattgtggttttttgttattaattttgttcataaataacatttcttggatttgtcaaaaaacaattcggtgtaattgttcttatatgcaagtttcaattattttatattttgggttatataccaattaagtaaaatccactatttttttcatgtatctctaccatttattattttatatcccttgtagtaattacgcagagcaatgtaaataattcagatattatttattcattaaaacatgacagatttattctcaagataaattctcgacggagttgtatattttccactataaaagctgtaaacaatttgtaaaacattcattatttacctagaactactgctcatattctatttaaaaataaatcgtaagattatgttcatttgcataataaatattagcaaagtttatagtattataatngtaaattatttgcataaaggngtttataagtaattagttttgtga

SEQ ID NO: 1671 - DNA, 500 bp, Ctenocephalides felis
  misc_feature (342)..(342): n = unknown
  misc_feature (353)..(353): n = unknown
  misc_feature (356)..(356): n = unknown
  misc_feature (380)..(380): n = unknown
  misc_feature (388)..(388): n = unknown
  misc_feature (391)..(391): n = unknown
  misc_feature (394)..(394): n = unknown
  misc_feature (402)..(402): n = unknown
  misc_feature (409)..(409): n = unknown
  misc_feature (418)..(418): n = unknown
  misc_feature (425)..(425): n = unknown
  misc_feature (432)..(432): n = unknown
  misc_feature (439)..(439): n = unknown
  misc_feature (455)..(455): n = unknown
  misc_feature (463)..(464): n = unknown
  misc_feature (473)..(473): n = unknown
  misc_feature (481)..(481): n = unknown
  misc_feature (495)..(495): n = unknown
acaataaggaaaattttgcaagcgaaagtttttggataaactgaaatatcattatgttaatgtttcatacactctacaacttattgattttttttttctttttttgaaaatgatttttagagtttgagttctgaatatttcgaaaaatttagaacacttcaaaagttttgaaatattaatgatgaatgtggcatgttctgtaaataattcaacaaactaaatattttatactagattctagttggataaaaaataattcctgatttataatatcattaccaaaatttctctaaacaatttaccgtaggcaaaattttgttagaatattggtgttttttaagnaatctcaaaanggnataaattcccaaaaattcccattnttgggganttnttntcttaatnttggaanaaaaatggnggttttnttccaanatctttnaaaaggggttaattanttcccaanngggttttgngaataaanattcaaaattttgnccttt

SEQ ID NO: 1672 - DNA, 500 bp, Ctenocephalides felis
  misc_feature (331)..(331): n = unknown
  misc_feature (353)..(353): n = unknown
  misc_feature (356)..(357): n = unknown
  misc_feature (360)..(360): n = unknown
actaattgattattgttattctgcaagatatgatgttccgaattattactgttccaattaattcttttacgaagtataactcatatttatttttacactaacatacttgttactctctagacatgtttttgtttgcgttttgcgtattaattacttgtgtgttttgtttccactgaagaagagtcaaattggaactcgaaccgtatggatctaataaatgtattttaagaaacatctcttagttttctttctattcattatctggatagatgactgttaaaaagtttgtgttatctataaattaatttcttgaagggcgtaacatcaagcntagagcgggggttaggtattcnaanncanagggggaaacattatttgaaacatattggtaattttcgtatagaaagggagtatcagttcgcttattaatactaagtttggctaagaaaataaaaatcgattccgcatagcgctttatgagactttcgctcatgataaaa

SEQ ID NO: 1673 - DNA, 441 bp, Ctenocephalides felis
  misc_feature (408)..(414): n = unknown
  misc_feature (416)..(419): n = unknown
  misc_feature (421)..(422): n = unknown
  misc_feature (424)..(424): n = unknown
  misc_feature (426)..(428): n = unknown
  misc_feature (432)..(432): n = unknown
  misc_feature (434)..(435): n = unknown
aaaaaactgaggtcgaagcataagtcgcgccttccactatcgcttattaattatacttttactatgtattataaatgaattgaaaatattttttatctcaaatatctaaattgttacatctatacaggcgtttatcaacatcaacagtagaatgcctttctgatcttttgtaaaacaacttatattatcaactgatttttcaaaacttttgtttttttctatctgatatgttttttgatataacatgttaatgattgatataacttcaacaataaatgacatcatatttcagagaatcagttgccacaaaaaataatttattaatattgtatgtttgtaaatttgttaagaaaagaaaagcaatatcttgaaaacatatatgtatataatattttaaaaaaaaaaagnnnnnnncnnnnanntntnnnaaanannaaaaaa

SEQ ID NO: 1674 - DNA, 262 bp, Ctenocephalides felis
actaggcaaatcaatattatccttttcgcattcagagttctgcaaaacactttccgaacgtaatttctgcatttcccaaaaaagtcttctataaaaatgtctatctgacacagtcgcaatgtgtttgcgaatttttttatcagacatatttatttatacaattttttttgacaaattacagagtcaaacaacaaacaaattacgaatatattatattctaatattgtttagaattttagtagcataagtatacgtatacagt

SEQ ID NO: 1675 - DNA, 500 bp, Ctenocephalides felis
acatttaataaaatttattgtaaggttctgtaggagaatggaaaacgatattgttaatacaataaaatacaaaatcaattttttaaatttatcatcatacaactgcaaatactaacatatattttttcaaataaaataaagttgcttttttggtctcccttaattacccttcatatgaactttatatcaaatgaacattttatatattgaagccttttatctgataatagaaaaaaactatagttcaaaagctttaggagaaagaaaatatccaatgctatgtcaaaatctttttcggaatcttacttttcaaacactttttatgcttgcatatgcactttgtgaggaactatagcaggagttgaattataaggattgtaatgcaaaatttataatttcaaatggccatagctaacactaaaatcaaatgttgatattttctaaatattttccaaagaaattcaatgacaaattttgatggttgtgtagaatatagatca

SEQ ID NO: 1676 - DNA, 500 bp, Ctenocephalides felis
acttaagaacaaaaatctggtaatcatttgtgtgaaagtgtaataggacaaatagaaatttatatcattctaagtcattcaataaatgctgctaatgaataattttcatgaataactcatcaaaactaattcagattttaatgattgaaccgttattcattaaagcaatcgttttctactaatatgaaatttgcctttcaactaaatttcctttataagttcctttgactgcaagatataaagagaaaataaatgacattataatgttttatgtattcctatgtgagccatttgcagtattcgatataatactcataaatcagtatttaaatctgagacgcctgctccatgtcataaattatgaacagttattttcctcaaatcctacacagtaattatttgatatttatatagatgatataaataaaatatctttaatttcgttttggttaatattttatggaagctgaaatcaaaaacatctgctaaaataattaatt

SEQ ID NO: 1677 - DNA, 500 bp, Ctenocephalides felis
  misc_feature (487)..(487): n = unknown
  misc_feature (498)..(500): n = unknown
ctggtaacgaggaaacactatttttaagagcagaagaacgcgattattcaaatttaaaagagcacaaatttataccaaagcaagatggcaaaatcatgcaagtgaagcataatggagctagtcatatatatttatatttgccagccgatactgatttgaaagatttagattcattattttctcatggagaaaagacgcttggagactgggaatcagctaccgatggatatttctgtgatttggatgaaaccaatgaagccaaatcagtttgtatttctccttcagaagatacaacaaaagtgaatcaatctgagctattagacgaattcgaaactaaatatgtcaatgaatatgtagataaaagaaaggaaaaatgtcccaagtaacataaattatattcttacaataacttaatacatatattaaaatttttgtaacagtttatgtgtatgagtttaaacaataaattattaaaaataagattttnaaaaaaaaaannn

SEQ ID NO: 1678 - DNA, 330 bp, Ctenocephalides felis
acacgtttttttctaatattttgagactttgcaaattttttaaaatatccgattttttttaaattaacgaaatattctctattttttgtaagcaatctttttataacatgtcaaaatttagtttttttgctgaaaataatgaaaaatttcggaaatttgaatttttttaactttgattttttttgaaaattttgatttttttttgaaaagttttaaaattattaaattttctgtaaatgcatttttgcacactgtcttctcaagcaaaatgtaaaatgaaatttatctaatcggatgagccgttctctcaaaaactgcataaccgtttgt

SEQ ID NO: 1679 - DNA, 500 bp, Ctenocephalides felis
actcattttatatattctcggtggataaaatataattaattatgtcgccatctaacggtgtgctttacaaataaccaaaatctggtaggggggcttttgacccgacattttgagcttttaattttattccttattattatgtaaaatatagttgttaaaaatacatggctaagacagcatcgacgtttcatttaagtttaatatacattttggtctatcgacacggatccagtcattaaaaattacagtccacgctttacaattaaatatttgcgagttcgtctaaaagtgaagccaaataaagctctacgtgaatgaaaacccgggaacctgagaagccgccattaaagcttggaagcgtcgccaggagttcactggaattggaaaactataactaaagatcacaattggaaatacaagtaaatccacaattagtctaaaaccatttcaaaattgcttagtattattgttgtaagtttagtctatgtctcggccgcgac

SEQ ID NO: 1680 - DNA, 187 bp, Ctenocephalides felis
aaattcctacaattattttcgaatgacataaaaaggattaaacagcctcgaaatgtcgctgtttgtaattcagcacactgtaaaagcctccagaaatcagacaggatggatcggaattgcttgtctgcagcaggcctcttacagtacaaagccccagaaaaccaatctggctgctatgaaaagaggt

SEQ ID NO: 1681 - DNA, 412 bp, Ctenocephalides felis
acctccaaataatgaatttgtcgttcctcctagatttaaaccagttcctgaatatcaaattcattaagcatttatgtatgactatgtaaaataaatgaatttatattttatcatttttctaattcaattataatgatgaagaataaaaaaaaattcatcttgtcaaagataacttaaaaaataattaaatataaatagatttatctaaaagcagttcgtcttatgagaatttatattgaaatgctatgttaacttgtatggccgtgttgtattttacaaaataaaacttcttacctaaagtggtgttggtagaagtgtttccaaaaccaaatgtgctagttgctggtttgttaaatgtattattaaataaagagtttgaagtagttgtttgaccaaatcctccaaaaccagt

SEQ ID NO: 1682 - DNA, 380 bp, Ctenocephalides felis
acaacaggcaccaccagagaacatggaatccgaacgcccacatttcgtccaaccaagatctgtgcgcagcatcaaggagaatccccttcgccgcgaaaaacgcgtcaagagatgcgcctgcaactgcgaatgttaaacaaaaaccccaagaaattatttacgaaagcattgataaaatcaccgctaaacggaaataatttttaattcaataaaaaatattttgttaaaacatattcggatattaacaacatgtttatttctttaattttaaactaatgcagttattaattgtataaataaaattagagatttttattaaagaatgacgaaaagtttagatcaaagtcttgtatatatgttcttttaaaactgttacacgt

SEQ ID NO: 1683 - DNA, 182 bp, Ctenocephalides felis
acaaaacaaaaattcggcccagtaagggctgaaataaaaatttacatttatccgaaattaaaatatttctaaatttaacacttctgcataaagttagtgttttagtttatgattatatgcagttatttttcccggcaattttaaattacatgtgaaaacgcctagctaaatctaactacagc

SEQ ID NO: 1684 - DNA, 500 bp, Ctenocephalides felis
  misc_feature (8)..(8): n = unknown
  misc_feature (10)..(10): n = unknown
  misc_feature (15)..(15): n = unknown
  misc_feature (19)..(19): n = unknown
  misc_feature (21)..(22): n = unknown
  misc_feature (25)..(25): n = unknown
  misc_feature (37)..(37): n = unknown
  misc_feature (40)..(40): n = unknown
  misc_feature (46)..(46): n = unknown
  misc_feature (48)..(48): n = unknown
  misc_feature (75)..(76): n = unknown
  misc_feature (79)..(79): n = unknown
  misc_feature (83)..(83): n = unknown
  misc_feature (88)..(88): n = unknown
  misc_feature (99)..(99): n = unknown
  misc_feature (119)..(119): n = unknown
  misc_feature (122)..(122): n = unknown
  misc_feature (125)..(125): n = unknown
  misc_feature (128)..(128): n = unknown
  misc_feature (141)..(141): n = unknown
  misc_feature (143)..(143): n = unknown
  misc_feature (153)..(153): n = unknown
  misc_feature (166)..(166): n = unknown
  misc_feature (168)..(168): n = unknown
  misc_feature (171)..(171): n = unknown
  misc_feature (179)..(179): n = unknown
  misc_feature (185)..(185): n = unknown
  misc_feature (203)..(203): n = unknown
  misc_feature (214)..(214): n = unknown
  misc_feature (216)..(217): n = unknown
  misc_feature (220)..(220): n = unknown
  misc_feature (231)..(231): n = unknown
  misc_feature (260)..(260): n = unknown
  misc_feature (267)..(267): n = unknown
  misc_feature (273)..(273): n = unknown
  misc_feature (289)..(289): n = unknown
  misc_feature (289)..(290): n = unknown
  misc_feature (305)..(305): n = unknown
  misc_feature (307)..(307): n = unknown
  misc_feature (313)..(313): n = unknown
  misc_feature (316)..(316): n = unknown
  misc_feature (323)..(323): n = unknown
  misc_feature (329)..(329): n = unknown
  misc_feature (336)..(336): n = unknown
  misc_feature (338)..(338): n = unknown
  misc_feature (341)..(341): n = unknown
  misc_feature (349)..(349): n = unknown
  misc_feature (353)..(353): n = unknown
  misc_feature (357)..(358): n = unknown
  misc_feature (362)..(362): n = unknown
  misc_feature (365)..(365): n = unknown
  misc_feature (370)..(371): n = unknown
  misc_feature (380)..(381): n = unknown
  misc_feature (383)..(384): n = unknown
  misc_feature (386)..(386): n = unknown
  misc_feature (399)..(400): n = unknown
  misc_feature (404)..(404): n = unknown
  misc_feature (406)..(406): n = unknown
  misc_feature (411)..(411): n = unknown
  misc_feature (420)..(420): n = unknown
  misc_feature (422)..(422): n = unknown
  misc_feature (429)..(429): n = unknown
  misc_feature (447)..(447): n = unknown
  misc_feature (450)..(450): n = unknown
  misc_feature (453)..(453): n = unknown
  misc_feature (458)..(458): n = unknown
  misc_feature (461)..(461): n = unknown
  misc_feature (466)..(466): n = unknown
  misc_feature (470)..(470): n = unknown
  misc_feature (481)..(481): n = unknown
gacgtgcnantttancacnannaantgggggttgaanccnacctgncncaaaccggttagagctcagatcatggnngantgangggangaacagaccanataaagcaagttctggattnganaantantttacaccaacancnacggcgcgancaattttggcggnangtnctactaanagtaangacgctgccatcccttangcggcgtaacntnntangcacacacagnggccaattttcaattatatatgcttaatnaaaagangcttgntaagctcatccggtcnncccaatgaaatatangnagctanaanaacatantcctantccaaancnatntctatacntctntaanncttnaangggtnntctcgtctnntnnangtcgacgctcatnncatnanagggnccttctatncnattgtgngaagacagcaatatttgntcnatnattantcngcttncaanggaaaaacctntgttatgctcctttggcag

SEQ ID NO: 1685 - DNA, 377 bp, Ctenocephalides felis
accaaacgttaagttactaacagaactttggaaatacctacagttaaaatcaaatttgtttcacgcgcacccatgctcagaatatcaaaaataataaatgaatttgcttctgagattaatatctttggtctgtcgatgacaaatataaaaaatcaagccagaaaaattatccttaaaagactgtcttaaatagtgatttatagtaatttgattaaatgtttaattttattagtttttatttaatgttatatatttgtagtttatattaagtgttatgtatatatacaaagctatctatgaactcttaatactctaattttctcacatattatctctttaatttataatttgtagacttcaaaatgtaactgtattgt

SEQ ID NO: 1686 - DNA, 333 bp, Ctenocephalides felis
  misc_feature (2)..(3): n = unknown
  misc_feature (5)..(5): n = unknown
  misc_feature (42)..(42): n = unknown
  misc_feature (71)..(72): n = unknown
gnncntttatcaagtagatccttattgtttttaataaataancataaaattattctacataatgtcttcanngcgcccctttgttagaagcaccgtaaatcgcatgaatgctgttcgtggacaatgtagaaacagctcctacggtcatcatggacctccagcagattatgttcctccatccatgaatgagctaccaactccacaaggatcctggcaagctaaacacgatgcccgccaaaggaaatataatgcaacccttcttgctggcgttggtgtctttactggaactctcatttttatgaaagcaacagggttcgacttccactactatcc

SEQ ID NO: 1687 - DNA, 500 bp, Ctenocephalides felis
acatttacttcttacactgtatctggaaaaaatactgatttacgctaactaattttaagcatagtggttttgttttgacttatagtataaatacatgaagcattactcaaaagggatctagtccacaggcaagattttaatttaacagattatagtaatgcgaaaagatttagatctgccataaagtaactgaaatggcgaatcaatctcgcaccaaacagtattttttcagaccgttataagtgccatcaatattatgtgcttcgtaatcgcataataaatctcgagatagaccagatggctccacttagacgaatttatacgagattctaaataatttattgtctatcaacctaatcatatataaagttaataacccaattcagttttctgttaactgtggcaaatgtttgttttagggaccacacctaaccaaggaattcggttgagaaatccacacgttcttggtatatctgtggcatcaaaaatgaaatatttta

SEQ ID NO: 1688 - DNA, 500 bp, Ctenocephalides felis
actaacattgttgttgattgtttctatatgtgactaactattggttgagattaaaaactaatgaactgacttctctccttttaacttcccgtagggtaagttatagtaatcgcaaaaaaaattttttatatttcacgtttcagaggtttctaaacattttgaaacgtaaagatatataaaaattttcattttcgatttttttttttgcgattactataacttgccctatgggaagttggaaaaattaagctatgtatatacatttttgaaattgattcacgatttttggacaattttacacttttctgataattataaaaaaaaccgctcgcctgatcgttgcgcaaaactaataaacgctaactcactaagttaaatagaatggttttagtttttttcagtagaaaggagaaaacttgcttaactacactattttctaaatttggacttattcgattcagaatgacttgaacgttgatgaaacctaatattagcccatc

SEQ ID NO: 1689 - DNA, 500 bp, Ctenocephalides felis
  misc_feature (137)..(137): n = unknown
  misc_feature (418)..(418): n = unknown
accgccacatgagcactaagggagcgccaattaatcacgtgatcgatttttttaaggatttttaaacctttgcccttggtgatacgtggtgatatccaaaaattttctgatatttttcacttgtgaatttagactgntgaaaaatttaaaagtttactattgtttcatcatatcataaaaaattattatctcgctcttcaataaaacatggatttaaaaattgaaatagaagatccaagttaaatgttgcattatcattatttaatccagcaataaatatatctgcaccaaaatttgcctcaatacaatttgtattagttgcaataaaaaccatccttataaatttcaaaaatcactttaataatatcgattactaacgattattatttttaatctcttaatcataggattaaaaggncacgtagccggagtcacatgcatcgccaactaccggattagtaatagatcacatagaattagaaagaacggccatttagaag

SEQ ID NO: 1690 - DNA, 110 bp, Ctenocephalides felis
acaaactttgtaaaaatttagttaataagttacttgtaagccatttatttataacattcaaaacatctcgtaagcaacattttaatgggaaaattattttaccctcacgg

SEQ ID NO: 1691 - DNA, 500 bp, Ctenocephalides felis
acgagtattataatattttgaatttattaacgcagcaatcttgacccaattatctggtaaaattatactcttttctctttgaaaatatactgtttgtatttcaaaaaagtatgcatttcacacattttatgagtagttgtgtgaaacaattggatttcaaattattttaacttaaaaggctaataattatatattatttgatatcaatattaagctgtagtgatatccattttcacttgatagattacaatgtaatttcaagtaaaaatattctaaaaaaggacccatttattataatatgttattagtgttagaaaaaaactgaaaaatagatcaaatatagataaaacaaccggattgcctcctaaaaagtcacgttgttaagtcacttgcttacatttttagctcatagaattctcatgttctgattgatgttcaaaaaattcaacggtttctccgtagatcagtggtagagctttgggattcaatctaaatccaag

SEQ ID NO: 1692 - DNA, 351 bp, Ctenocephalides felis
  misc_feature (1)..(1): n = unknown
  misc_feature (67)..(67): n = unknown
ncgcgttgtatttcacactagatcttgcctgccgagcatgtttttattttttacaaccaacagtagnttatatgatagatgcaaatattgaattaaacaaaaatcaaagccatagttaggttacatcctaaaaaaaattttggtaaaagataatacaaaatatcttagaattcaatccgagtcattgaagcatttattattgattagcaaaaaaatatgaaataattaataaatattccaaatcaaatattagaatctatctatatttgatatcaaacacaataatactttacaagtatgttcatatcagttttaacttatagaattttgataggaaaaatcttaagaagt

SEQ ID NO: 1693 - DNA, 500 bp, Ctenocephalides felis
  misc_feature (3)..(4): n = unknown
  misc_feature (26)..(26): n = unknown
  misc_feature (39)..(39): n = unknown
  misc_feature (56)..(56): n = unknown
  misc_feature (59)..(59): n = unknown
  misc_feature (62)..(63): n = unknown
  misc_feature (81)..(82): n = unknown
  misc_feature (88)..(88): n = unknown
  misc_feature (92)..(92): n = unknown
  misc_feature (137)..(137): n = unknown
acnnagtagtattgaagatcttttgncctctggtgattnttcattgactatacagngtncanncttgtttaatatctgaannataaanatanatatatataattatcagaggtatttatattaataatatatacctntgaaattatttcagttcccatagaactccctaatttattataaagctcgccgagatttgaaaatgctgatgatcgaaccaaaaaatcctcatcatgtgtgccactcagaaaagtattaagaaatactgttttatacttttggacaattgatttttctggaaaataagataattataaaaatccatctctaatattttagcaactgaattaagcacctgcattaaatattaattttactaatgcttcaccaacttttaatcttagctcttcttttccatccttctgaaatttatcatgtcgattatttaaatattcttgtgtcagcaattcaattcatcttctggcatactttggaaacttctg

SEQ ID NO: 1694 - DNA, 549 bp, Ctenocephalides felis
  misc_feature (496)..(496): n = unknown
attagctgtagcagcattgcttgagttttgagttgataacctgcaacctagcctgcgacttctgttctattgataaaggagaaataattattttatgtccaaattacagggtgataaaacccattgacgtcaatttgaaaaaaaattcaataaaaaaacaatggacaggaggatgatatattaatagaatgtgcctttatatcaataatttcgaccacaaacactgccttttatgaattaaaatgtctttaaaagaatgtgaaagtgatataaaacatttaaaatcagaatctatgttatttgcatgtgaagaaaattccaaagaaaacagtgcaaactatttaaatggaaaacaaccaatcaagaatgtgagtaataaaatattaaaaaactgtcaaaatgtgacagctccattgagggaaatataaaaaatagcagcgatattgcacgaaaacgatggaagatattagcaaaagccctaaataaaccggcacangcatcaatggaagatatttctgtgcgtagattcacaccttcgtgtattaaatc

SEQ ID NO: 1695 - DNA, 549 bp, Ctenocephalides felis
gcgcgaacaacaacagttcagtgcgaattgataaagttatcagcaaaaaataataaaataacagtaataatacttgtcgataattttaaacttgtgcatttattactagtttatttccagaagtagaaataagttggctcgactattggaggaggtttatttactcataaaacgtaaagaaattaacatgtaattacaggtcacaaatatataattagcaaatacgtaatttagctagagtcattcgtgcgtaaactacagcaccgatcatttcaaaggaaatcattgggaaatttttacaatgtggataccgttgttttttattttaaatatcgcgttggtatacgcaggaaaattcgaagaaatctatgcttggaaagacgtagattttgtgtggccttctaatgaaataaaagaagaatatattaaaaatggtcatacatcaaggaaaataatcttatcttgggaatggccaggtggcaagataagtttttctcacaattccagatggaaaagtggagtacctcacattggctatatccacttaat

SEQ ID NO: 1696 - DNA, 549 bp, Ctenocephalides felis
gaggagtcggtcctttagcctggggtacagaaacacatcgaaaaccgcagacgcttccaccaaatctgagtccaaaattcttccatagatcgccaagagaagcattgagaagagtcactagtctattgatcaggaaaggggcagctggtggaggcacgccccgtgactcgcgtaaagaacgcgagggcagcgtgttcccgatgccgcttggacaaacggtgcatagggaagctttagaggaagtggtgcctaaacaaagaagaggatttttgaaaaacttttttaagaaatctaaacattactcactggaccagtaaataatcgaaaagttgacaatttaccgagttctatgttttttaggcataagataatatgtacactgccctcaactttagtcctaaccataatattagcattgaatactactgtagttacccgttttaggttgtaggattatttatttattctaataatgaattacaattaaccgtctgcatatggaacgaaggggaagtaagacagtttgcaataaaatagtgcctgagaaat

SEQ ID NO: 1697 - DNA, 549 bp, Ctenocephalides felis
  misc_feature (179)..(179): n = unknown
  misc_feature (481)..(481): n = unknown
aattgatgaagcacatgacaactctagctcttctggtgattgcattttgatagaggatgatcctattgcagatactggaaataaccaatatcttaagtttgggaaagatattgaattaatacgtatgggtgaatcaatggcacagaatgtcgtgtctcctactgttacaactcctaacngaggaaccatgccaaggaaacgaggaagaccaagaaaagatgctaacttaattgcgcaaaagaaagaacaacttgctcaagaaatgctacaaaacagtctctttccagcacagcatatgcttgaaggtctaatgactggatctggtgaaagcccagttagaacaagtcgtagaagtaccagaggacgatcatcagtgggtaaaggaggtatgatttctaccacaccaagggggcgtggcagaggccgtggctctaaacagcaagctcttcaggtttcaatggaacagcagaggattcaacanatgctgaatatccaggacaaatcattcagcagcaagcttcgggtgataatgccaggtgcatgaaaagt

SEQ ID NO: 1698 - DNA, 549 bp, Ctenocephalides felis
  misc_feature (513)..(513): n = unknown
ccgtaaattcatattctaaacgcacttgcgaatacttttattcgacattgtaacgttgactatgcttattctgtgagaattttcatgttttccaaaaattttcacaaaactgaaagagtgctcccgtaaattcacattctaaacacatttgcgaatacttttatgcgactttgtcacttagactgtgcttatcctgggcgaattttcatgttttccaaaaatttgcacaaaagtgaaaaagtgcttcagttcagtcacattctaaacgcatgtgtgaacacatttgtacgacgttttcaaaaaattttcacaaaattgaaaaaagtgttcccgtaaattcacattctaaacgcatttgctaatacttttatgctactttgtcacttagactgtgcttatcctgggtattttttcacattttcaccagaaaaaaatgtttcgcttcacacatacttggaaaaatgctcttgtaaatcagattggtatttggtcttttggaggtgggattggtgnaaacgctgacctacacaatcgtgctacaactcatat

SEQ ID NO: 1699 - DNA, 549 bp, Ctenocephalides felis
  misc_feature (525)..(525): n = unknown
atttggtcggtgtacgatgcctccgaagcgtctttgaagtggtcaatgttcatggggctcaactgttcctataggctcaccggccagtttgccttacgatcagtaatgaactagaatcactttaaataccttcgcatcaaacaatttttaaatagtacgtaatttacaattgtaaacaaaattgtcattgtatatacttatatgtgtatatgtatacacatatatttatatagttatttatacatattatatataatatatatgaatatgtatatatggtgttatcgataaaattaattttcactaacacattgttaggttttttaatatgttttaaacttcatttcgcaattttatataaatatgatagataaaatgttgtcacgataatagttgatttgaatatatatgtagatagagaatgcaatcatttggatgatatatttcccaaagtgcaatgtttattgctaagatatatttacataggtcatgtatctagtcatgtattcaagttactattcgtgnaatgaataatcagagtatttggta

SEQ ID NO: 1700 - DNA, 549 bp, Ctenocephalides felis
  misc_feature (17)..(17): n = unknown
  misc_feature (47)..(47): n = unknown
atcgacttaataagatncctacgaaagtggaattgattaagaaacgnaggtccttaataaaagacataggaccttaataagagatacaggcccttaataagagatatagaccctttgatgagacgcagtcgacgcagtacctctgccaacccttaggaaagacggtggagtcgctggtgtgggatatagtgtgttcgtgaattttgtgcaaaggaatagtgaaataagagatttgtttagtgaatattgtaacactggttgttctactgttgctgttttattatttagtgaagaggaaagccaaaacaatggtttcgtcccagaaagtccctttgggcagttgctgccgttgctacactctacggacgggcaccatcttcagtggtgtaatgggaatattattggcggtggtcgcttaatattgatgtttgcacttcggcgagttcaagacaataaccatagtcagtctgcatcgtggatcgtaaagatatattaccattaatctacctgactgtctcatatcggtatgttgatataggagccgtaagc

SEQ ID NO: 1701 - DNA, 549 bp, Ctenocephalides felis
gcggtaacgtcattcattgcaacattaatatgggtgttcgtttacctgctgggaattcgagaggtgctacaacttcccatcaactggctgttgacggagctggttaacactggcatcatcaccgtgctatatacgatcgctttcattgtgcagttagcgaaatgggtcccgggttggctggttcattcgtcgcatcaaacattacggcgggagtttttggaattttcaatgcattggcgtatgctgccggagtttactttttgcacttggaatggaaaagcagcggcggtgcatctacgaactagtcctggttattatagttcatttactcaacaccggctgttgtattcatatcaactatttaggataaaattcttattatatttatcgccaaacagtttgtatgtataagtacaaacaattcgttgaagaattatgtcgaaataacgaatataaaatttatatttttctaaatgtttctatatgaatggttttatataaaaattgatacaatatttcataatacctgatgaattatatagctggata

SEQ ID NO: 1702 - DNA, 549 bp, Ctenocephalides felis
  misc_feature (15)..(16): n = unknown
  misc_feature (19)..(19): n = unknown
  misc_feature (46)..(46): n = unknown
  misc_feature (519)..(519): n = unknown
aataacgctgttgcnnttnctggaactgtactggcagcaaagcganccggcgcggcggacagtgggttggctgcgaatgttaaaacgtctgcgcaaagcgcgggaaccacggcctttacgcttaagtccattgcatatggatgtccacgccggaaatttagtgcatagcgcgtcagggttaaaactcatcgactgggagtatgccggagatggtgatatcgcgctggaactggcggcggtgtgggtggaaaatactgaacagcaccggcaattggtcaatgactatgccactcgcgcgaagatttatccggcgcaattatggcgtcaggtcaggcgatggtttccctggctgctgatgctcaaagcagggtggtttgagtaccgctggcgacaaaccggcgatcaacaatttatcaggctggccgatgacacctggcggcagctattaatttcccgcagacatgacccttttagcactcggtatcaaccataaaacggacctgtatcgtggaggggggnccggtcccaattcgcctatagtgagtcgat

SEQ ID NO: 1703 - DNA, 549 bp, Ctenocephalides felis
gctatacccaccactagaacctgatcctgtctttagacggagagtttttgggcctgattctattttaaacggaacacccaaagataaagtagatagagtacggggaaatgattcaaaattagttataacggcaatccaaggtttggtagcagatgttgatcaaacaagagctgctgtacaaaaccaacatattgaagattcaacacgaaatactagtgtagaggaccatgtgcatttaaatgggaatattaagaccagtgacttagttaaatcgaaaacatcagacccgactattaattcaaaagttcatggagaagtagaacataataaaaatttcacacaattggatcaggaaattgaagacaaacctacagttaagattttgggcatggagatgactacgcagtgcgaaggtggcagaaatttagtcaaccaagttcaccaattctttatcagctccaagaccagaacaattgtgccatcaatatatttggaggacttcccataatccagttttggtcagaattgaccacacagaattctccgttc

SEQ ID NO: 1704 - DNA, 549 bp, Ctenocephalides felis
agaatcagctgtcacttatcttggttacattattctgtatattttcaagatgcttcaatataaatattatgatacgccagatggccaagatttaataaaaaaattatttataactggaaaatatgctactttaactggcttaggcatctcatcattagatgtgcttctttattcaaagcctaaagggtatttggaagcattaggaagatatgcaacagttacggggcctcttgtgggaatggctgctgtttttacaattggtacctatgtagctaccaatgttcgtgaaaaagatgactataagaattatgtagttggggccacttcagctggttgtctatggggcgctttacgcagaagctatattacagcagtattcagttctttagcgttttcactagctggtgttatcaagaaaaaggcaatagagaatgattatacattatttcctcacctaagagacattttgtggtcattgtggagccaaaagccgatttactatcttaaaagacgccaagggtggcccaggggaaaatgataacataaatt

SEQ ID NO: 1705 - DNA, 549 bp, Ctenocephalides felis
  misc_feature (536)..(536)
agattcttagtgcgatataggatataacatcacaattagtgaaattgatttgaagggaaaaatgtcggaaacgagcgagggcgtccatccgttggtatggtccgcgggtttcattgcctttaccctcttgttggcgcaagtatgccgcatggccgcctccaggacgcagcgcggaatgatccgatccttgattttggaaggaatcgccgccgctgaactttgtgcttcctgcttcgaattgatcatagttgccgacaactacggtgtatctatgtacgctattttcctgttcgtcctgacgatatggtggtccatggtttggggcgatgccactgcctgcccgtatacgcttctggaagatgtcgtggaagacaaagctacattgcgcgaagctgactgaaaacttgggcacaactagttggcggtgtctgatatttcgtatgtcaattattttggtatttggagcttctcaacgcatacaggaagagcatttgaaaactgacggtgatttacaggtatctctatgctaggaacgnaatagaagattgc

SEQ ID NO: 1706 - DNA, 549 bp, Ctenocephalides felis
gagagagagagagactgttcgaggaagcaatgaaaagtccacttaacgccgaacctgtaaataaatcattccatcagtatttgaagccgtttttgcaatccaatctgtgaaaagaaaatattctacatttttctagataaagtggaatgaattgaaaatattaaggagtgcacgtgttttgttttgcgaaatgctatattatctgtccatttatacacaagtattcagagattaaaaaatcaattacttaaatcttattttgaatgccacatatttattacaaagggcttcaactataaatttattttagatatatacttatcaggatatacctgataattatgtctcttttctgagcatataatgatgcattcacaaaacaattttgaacaaaattagaaaaatgatataaaatgtaaatgacctattcctaaatcattgcttcatattatttcgcctccatttttttccagcggtttattatagtaatatgatttgtgaggaatttatcttaaggagcatttgtaatgaattagaagtgttagatca

SEQ ID NO: 1707 - DNA, 549 bp, Ctenocephalides felis
gagagagagagagagagaactagtctcgagttttttatgtcgcgtttttgtatgtgctataatttacatgttgattattgaatcttggtcttccatttatttgaaaataaaattcatatcttagttatttaataataataacctcaaagtttatgacagccagtttcataacattgctagtggtagagattattagttaggttttatcagatagtgcacctcttaataatctgacagcagaaaaaataacaaaatatgtcagattcgatgtcacttcattccacatcggcaaaattgattgtggaaaatcctttatgggagcaaaatacgttcgttggtcggttccgtcacttcttatggatgaccgattggcgatcctgttttgcttcagaacgtgatctcgataaagcagaagagttgataaaaaaatgcaaacgcggtgaaggatgcggtgatgcgcaaggtgcgacttgattacccaagagctatatgaatcaccttccccggcactggagaaaacaaatctttcgaccatgtattcagtgcccg

SEQ ID NO: 1708 - DNA, 549 bp, Ctenocephalides felis
  misc_feature (464)..(464): n = unknown
  misc_feature (483)..(483): n = unknown
ataaaatgacaactctcttgataatcgcgtcgcaaaaaaacatttatcctttcaaaccgatcacaaaaacacctaaattaaccagcattgtgaataaagtgtaagaaccgacacaagactattaatacaatgaccagtgtcaatctgacaagaagatgtgtcctgtttgggtggaagcattttgccaaaacaagaaccaacagcctcatatactcttcccagagacaacttattacacctgtgccccagatatctgtgttgtcttcaagttttatcaaaagcagattctattcgacacagaaaaatgaacagagtgctatgaaaccagacgatgatgattctacggataaagacaaggataaggaagctgttaagaaggaggaggatgttaagaaaatgggtttgttaagaagtttaaacaaatgtacagggattctggatgtgctgatccggtgcatgttgcncttctacgtgctgggctgnctatttactcccgcaaaagtggtgtggtgtgatagcatcctggatcgtcaagcagtctgactatcg

SEQ ID NO: 1709 - DNA, 549 bp, Ctenocephalides felis
cttgaataacacatcacacaaaaataaaattatctagtactaaatattctattttgtttatcaaaatgtttaacataactcatataaacactataacaacccaagaattttgcgaaaaattcaacaatgtcatagaacactacccgggggctgctgaagacatggctaagcaaagacctttcggaaacaccgaagatttgatacagaaatttagtgattatttggaaaatttaccaaaaacagaaaaagagctgattttaaaactgcatccagatttagctggaagattgcttgatactggcaatctgacacctgagtcgcagaaggagcaggaggcggcaggtttgcacaaattgtctcaagaggaaaaacagttgatgaccgacttgaatttagagtacaaaaagaaatttggtttccctttgtcattgtagctcgtgaaaacaaagctgcagcaatcttaaacggctaaaacacgtttactaaatacaagagaccaagactctctgccggataataagtcaaagctatcagattggaatcttactt

SEQ ID NO: 1710 - DNA, 549 bp, Ctenocephalides felis
  misc_feature (4)..(5): n = unknown
  misc_feature (472)..(472): n = unknown
  misc_feature (537)..(537): n = unknown
  misc_feature (547)..(547): n = unknown
aatnnaaagtgaacattatatacattgttggttacttagatccaagttataaataaatattaaaattcgacaaatattattcaccaaaatatattgattgcaaatacaaacgcagatttattatcaaattataatagcatctcttacgtactgtgtgtttcccagttctaatcagtgttttcgtgtttcaagtttggataaaataaaaatggccgataaagtaccagacaccaaccaatgcgccttgtcacagaaaaaagtcgaaggggccaaaagcaacccttctttgctgccccatttggagtctttggaacgcatgatgaaactgcctgtggtagaagcggcctgggcccaatctcagggcgtttatgataaagttaaaggttacaacccgatgctgacatgggcatttggaacagcgaaagcacagtcaattggcctggcaacagcttcccttacatccagaaaattncaaaccaatccactatgtcgatgagacctcgcaaaggatcacaattagaagctagttcatcgcangacacctagnga

SEQ ID NO: 1711 - DNA, 549 bp, Ctenocephalides felis
  misc_feature (54)..(54): n = unknown
  misc_feature (502)..(502): n = unknown
aagaactcactattgtttatcattccatgtgtattttcatatattctagaagtntaaattattctaaagcaaatgcttaaatatttggaaaatatattgctatgtgtttttatatgagttcatttgatatatgaagtatcggagcatgttttatttgtgttttatttatcatcgtatatctaattgtttatttaactgaaatgtgtttaaaaaatattatataattcttacttatttatgataaaaattcaatttccatttaattataagattctttgacaggttttaagactgttgattcgttttaaccacatttagagcaagagttaaggttaacataatcagtataatatttcaataatgtgacaatgagtaatatttgtactattgtaattgtactgataacacaaatctctaacatataaaacatattcatttttcttcaaacataactaaatcgcatttttgattatttgacatatatatatatacatcatcatcntacatatatatatatatatatatatatatattatatataaaaatatg

SEQ ID NO: 1712 - DNA, 549 bp, Ctenocephalides felis
  misc_feature (38)..(38): n = unknown
  misc_feature (530)..(530): n = unknown
  misc_feature (549)..(549): n = unknown
gttttagtgctcaagtgctccaaggtaattagccagcnggtgaagaaatagtgagtaaatatcaatcaaagtgttttttattaatactgttgaacatcaaaatgagtgtaaaaattgaaaatattgaatcggaaaatccaaaaataatacaaccgcagtacagcgtccaaaatgtctgcccgcttcaaacaagcgctactgaagcgcctctatcaggagaaaaaggaaatgatagtgatagaaaagaagcaaaccaagtgggtgcaacaaatgggaagaagaaaaaacatagacgaggtaaatgtaagagaaaacctaataaaccgtacaataaaacagcctggacccaacgtaagaatgtccaaaaagaaatgatgagagttcgtagtgcccgtgctaaaatattagccatggggcacacattagttccttgtaacacgaaccaatttctcatggaagatcatgatgtcctcaccaaggattcatctgcagactcggactctacttagtgtcgttctgaagacactctnatgtcttcctgagatgagn

SEQ ID NO: 1713 - DNA, 506 bp, Ctenocephalides felis
  misc_feature (3)..(3): n = unknown
gtnttagagaggttatttaagattgttatattttcataaatatctcggacatggctactaagtttattgtaaaatgtggtattgccgggggcatagtttatcaatcagttgaccaaggactatggggtagcagttctagaacaattgaactttatgaagatttatctaaactcgtggaaccagtaaccaaagaagttaagcaaaagattgagcttccagatttgcctacatctggtgaagttggtttcattgcaacttattattggaatgcaggtgtgaaagctacatttgcatttttaaaagaatttccaacgaatactgctcgattgggatgcaaatcttataattatattgtaaatcatcctgaaataaaaaaattgcaggagcaaacagaaacaaaaacagaaaagaattgatatgtatatagaaaaaaatcatgattatggattatgtagataatatttaataataaatgctatacatcttaaaaaaaaaaaaaaaaaaaa

SEQ ID NO: 1714 - DNA, 549 bp, Ctenocephalides felis
  misc_feature (171)..(171): n = unknown
  misc_feature (178)..(178): n = unknown
  misc_feature (222)..(222): n = unknown
  misc_feature (529)..(529): n = unknown
  misc_feature (544)..(544): n = unknown
gagttttttttttttttttttgaaaaatatacactaagtaattacatttatattcaatttacatttgtacatcattgtaattgactacgaattaacagcaatgataaaatactttatatatgtatatatatatatatttgaaaatctgtgtaaaacccgttacaaaaatantatacangacaaaaaaaatattacatcatggcaacctcgactgtccatctntcaattaaaatctacactatcttttgtttgttattaacattttcctattggatttaattattaatttaaatgctttcaatgattcaattagcggaatcattttgctttggatatcttttcacatatctcgtttgtgaattctgaacacttagcgttgctcctaaatcacctgttaggtatttggcttcacggattgctcgaaggctgctgtttaattaagtctgcgtgtttgaaggtcatgtgctcagcatcattcggaggatacaagagggcagtggggttgctttgcttgccgcttgctgggtgncgtgccagatcaaangcgct

SEQ ID NO: 1715 - DNA, 549 bp, Ctenocephalides felis
  misc_feature (3)..(3): n = unknown
  misc_feature (5)..(5): n = unknown
  misc_feature (198)..(198): n = unknown
  misc_feature (488)..(488): n = unknown
  misc_feature (517)..(517): n = unknown
  misc_feature (520)..(520): n = unknown
aantntcgtctgtgaatattaggaaaaaggcgggttttaaagaatttgcaattgatattaagtggttttttatttaattagtttaagtgttatataagtgcaaaatcatgacgttaatagtgaaatggctcagttcttttctgctgatcgcatccttggcattagcacaagtgacccccaaggaccccgcctgcatanaaggcttcgatggcaacatccacgccctggacgcggctgaattggacttctctttacgaatgttagctgctgcagttcgatctgcacctggtcaaagtgtatttttttcaccttacagcatttatcaagctttgctcttagcgtatttctctagtgctaaccataccgaagctaacttgaagaaaacattagctatcgaggaacatgtgccaaaactacaagttctgcatggatataactttgtgagaaaaatgcttggatatagaacgaatcaatcatatgaatcaatntgctgtcgcttttgtactaagatgaccanttnggattgattcaagctgcatgagagacaaa

SEQ ID NO: 1716 - DNA, 549 bp, Ctenocephalides felis
  misc_feature (5)..(5): n = unknown
attcnatgatacaattttgtataaattagaatggccaggaagaactgacgaatttttagaacctccaggtagtgagtctatgttcatcacaacagctgataaagaacgatatcaatgttttgttcctaaaatctcaacaccagagtctgaaaaaaatttaccatatagtggaccaactgcgttagaattattggcacctttattcacacaaactgcttgttcatatcgtgttgaaagctattggacatataagctttgccatgggcggtatgtgcaacaatatcatgaagaacgagaagggaaaaaggtgaaaactcaagaatactttttgggaaagtggtctgctgaaaggcatgatgaattattggctgaaatttcaaaagcagaaaaaagctcagaacctttgcgaaccacaaaaattgaatcagcagtttgcttttgtagaagtagttatgacagaaggtctttatgtgatttaaataataaaaaacgagttacaagagttctgatgttgtatgcaatggaaacatgaaattattcctaaagaaa

SEQ ID NO: 1717 - DNA, 549 bp, Ctenocephalides felis
  misc_feature (539)..(539): n = unknown
aataccggtggcgaaggcggccccctggacgaagactgacgctcaggtgcgaaagcgtggggagcaaacaggattagataccctggtagtccacgccgtaaacgatgtcgacttggaggttgtgcccttgaggcgtggcttccggagctaacgcgttaagtcgaccgcctggggagtacggccgcaaggttaaaactcaaatgaattgacgggggcccgcacaagcggtggagcatgtggtttaattcgatgcaacgcgaagaaccttacctggtcttgacatccacagaactttccagagatggattggtgccttcgggaactgtgagacaggtgctgcatggctgtcgtcagctcgtgttgtgaaatgttgggttaagtcccgcaacgagcgcaacccttatcttttgttgccagcggtccggcgggaactcaaaggagactgcagtgataaactggaggaaggtggggatgacgtcaagtcatcatggccttacaccagggctcacactgctacaatggcgcatcaaagagggggnccgtcccaat

SEQ ID NO: 1718 - DNA, 549 bp, Ctenocephalides felis
  misc_feature (525)..(525): n = unknown
  misc_feature (530)..(530): n = unknown
taacgttactaacaaatcgtcatctacttgtaattattaagtaatacttcataattaagtcctgaaaacaaccagggcagcgggtttaaataaattgtcctcaacattttttcttaaaatagaggcgttttgtatgccaaatattcatgaatatgtacttatttcaagtttcgtttttagaaatactatttaggtattgtaatagcatggactatcattccaaaatccatatctatttttataattgtttttgtagaatgatattaggagagacttatatgaatgattttgaacaataatggttgaaataaactattcaatcttattactttttacatatatgtatttatttacatataaatacatatttgatttcaatttgattcaattgtttgttgaattttttgttgatagatctttttgcagtgttttctcgtaagttaattcaaatatatgcgggcataagtaattcaatagaatatttttctgtatacttctatcgtattcattgaatatattaattgnaaagngctatttatatcggtaaaa

SEQ ID NO: 1719 - DNA, 549 bp, Ctenocephalides felis
agaacagattttcaaagacgccaatgacagtattacacttttggctcccaatgatgaagtctttgaatcattgactgaagaagatcttaatgtattgttggaggataaagacgccgctagtgagacattgaaaatgcatgtacttccagagattttatgctgcaccggaaattggccataacgtatggccattcttggaatctgtccgatctttgacaaggccattaaatatcaaccgtgatccaaataccgatgaagtgtatattggaaccacaactgtcgcccaatgtgatgtaatgaatattaatggagtcatacacagagtcgacaaggtaatgttacctcaacgacctaaagtaagaatgcctttcttccgtcaattcatgttttactaagcactgattaagcgtgaatatatattttcatataccaaataaagccattagtttgaattttcgatatttgtaaaatgagatgattgaaatatttcattaggacgctaaatctaattgagtattgtattaattaaaaatttataattaattatag

SEQ ID NO: 1720 - DNA, 549 bp, Ctenocephalides felis
  misc_feature (448)..(448): n = unknown
  misc_feature (525)..(525): n = unknown
  misc_feature (526)..(526): n = unknown
  misc_feature (541)..(541): n = unknown
  misc_feature (549)..(549): n = unknown
ataaaaaataagagaaaatggtcgtttgtagagttatatcattatcttgtcgccgtttacatgcacctgccaaatttttgaacccacttttgaattcacaaaatcaattggcaaggacgagtattaaatatatttctacatcacagattaactttgcagaacgtaagtacacagataaacatgaatgggttgttgtcgaaggcaatgtagggactgtaggaatctcaaaatatgctcaggaagccctcggagatgttgtttatgcccagctccctgatgcaggtacagatctttctcaaaaggatgaatgcggagcattagaaagtgtaaaggcagcatcagaattatattctcctgtttcgggcaaagttactgaaaaaaactcagctgtagaaaattcaccagctttgattaacacatcatgctatgatcaggttttgttacaggntggtattcaaagtaaatctgcgaagcctgaaaggtgaataaattgatgagtgagaaaagtatgagagttttgaagannacccattaaattggncattaaan

SEQ ID NO: 1721 - DNA, 549 bp, Ctenocephalides felis
aaaccatacctagtccaatttggcatttagaaacaattgcaaaatataaaaactaaataaaaaatgggtgtttacgatttgttattcaggaggacttccacatttgtagccactattatggcctcgacgttctttttcgaaagaacgttcgaattaggttctgaatacatgttcaacaaagttaatgaagggaaactgtgggcgcacatcaaacataaatatgaataaacaacaactcaaattggataaagtagagtttattatataagctagacaaataaatttttattctgttacttcccaaggcttttctggtctgtcagcgtcccatggttgagccttcttgaatcttgctggttcattgagtgcaacaccacctgaaaaatcaattatgtaataaaaagtgtaaaatataatatagtagtaacagaaaaaaaaaaaaaaaaaaaaaaaactcgaggggggcccggacccaattcccctataggagccgattacaatcactgggccgcgtttacacgcggactggaaaccctgcgtacccactaa

SEQ ID NO: 1722 - DNA, 549 bp, Ctenocephalides felis
  misc_feature (522)..(522): n = unknown
  misc_feature (526)..(526): n = unknown
  misc_feature (534)..(534): n = unknown
  misc_feature (545)..(545): n = unknown
atttatttagtaactttaattagtgtacagtattagcaaacaaaatatgatgaacattcaaaaaatcgttaggagcttaaaccgagctggagttgcaagaatgtcaactggacagtacggtgatggtgctggcaaaggaggtggtggtggtggatccatccgtgaagcaggtggatctttcggcagaatggaagctgctagagaagaagaattcttttataaacagcaacaagcccaattgaagaaacttaaggaacaagcaatagatcagaaaactttccatgaggaacaattaaaacttcacaaggaggctttggagagacatgaaaaacatttggctgagcttaagaagtaaattgaagtttcatatatagcattatgaaaatgttagacagtgataaaaattcaaatatttgttactatttactgaattaataaacttgcattaaagcttctataagttattagttttctagcattcttaatatactcattgcactacattagttttaaattctggtntatnatgtatgnactagatttgnaata

SEQ ID NO: 1723 - DNA, 549 bp, Ctenocephalides felis
  misc_feature (512)..(512): n = unknown
aatctgcttaatgcgcgcaaacacctctgtcagctcgctgacattccccgccagacgctgattttccagctcagcagtcgctttacttctgctaacataaccgggatcgcggcgagacagggtaaactccgccagaccaatcggatttgaacgataagaagaggtttcaccggaaggaatcagttcgtcggtggtggtcacttcgtcgaggatcttcgagcacactttcaggacgatattgtcagtcagcgcacccaattccggccagtctttaatgttcggcccgtaaatcagcggttgctgagttgcccctttcacaaagccctgataaacacggtttttatacggcgttacatcgaaggcgtactccggcacgttgtcccagcaatcaagttcgctggcagaggttaaatagccaccgtttgcgcagtcgcagcgatagaacgagcgtcatcaacgccaccgctgacatctgccattagctggcttagagccttcgcggtcggaagttncgcgtgggtggcggatctcacgcagcggacagcgttg

SEQ ID NO: 1724 - DNA, 549 bp, Ctenocephalides felis
  misc_feature (432)..(432): n = unknown
  misc_feature (491)..(491): n = unknown
  misc_feature (524)..(524): n = unknown
  misc_feature (539)..(539): n = unknown
  misc_feature (544)..(544): n = unknown
gtcagacggagacgtgctccaaacgctcttataaaagaaattgttaaatctattgaaatccttattcatcggtgcctattttcggcttaaatatggttcaaaagaagcctaagaagaaggtcggaaagaaagtggcagccgcccctttggctgtgaagaagtctgaacccaaaaagttggtgaatcctttgttcgagaagagaacaaggaactttggaatcggtcaggatatccagccaaccagagacttatccagatgcgtgagatggcccaaatacatcagaatccaacgccaaaagagcgttttgcagaagcgtttgaaggtccctccaccaatcaaccagttcacgcagactttggataaacaaacagctacacggttgttcaagattttagaaaagtacaggccggagactgtattgctaagaaggnacgtttgcaacacgtgctgaagctaaagccagggcaaagaagacacacccacgaacgtncaatgttgcgttccggcacaacactgcacaaantgtgacaaaagaagnacagnttgcg

SEQ ID NO: 1725 - DNA, 549 bp, Ctenocephalides felis
  misc_feature (524)..(524): n = unknown
ctttgggggtaagcggggttcctgtaccaaaagattcatcagtccgcatcaagtgtccgggttgccaagttcgacccgtgttccattccaatctttctagccagactcacaaaaaactacaaccatggctgacgatgaggagaagaagaagaagcaggcggaaatcgaccgcaagcgtgctgaggtgcgcaagcgtatggaggaggcctccaaggctaacaaggccaagaaaggtttcatgaccccagacaggaagaagaaacttaggttgcttctgcgtaaaaaggctgctgaggaattgaagaaagaacaagaacgtaaagccgccgagaggaggcgcatcattgaagaacgttgcggtaaaccaaagaacgtcgatgatgccaacgaagaggcggttaagaaagttctgcgcgattatcaccaacgtatctgtccttggaagattccaaatatgatattggatctcgtaaacgcaaggccttcgagattgccgtctcaactcacaggtgaacgacctagangaaaattatgaacccccctcaagaa

SEQ ID NO: 1726 - DNA, 549 bp, Ctenocephalides felis
  misc_feature (17)..(17): n = unknown
  misc_feature (464)..(464): n = unknown
  misc_feature (537)..(537): n = unknown
aattcggcttcctgctngacgctctgaaatacggtactccgccgcacgcaggtctggcattcggtcttgaccgtctgaccatgctgctgaccggcaccgacaatatccgtgacgttatcgccttcccgaaaaccacggcggcagcgtgtctgatgactgaagcaccgagctttgctaacccgactgcactggctgagctgagcattcaggttgtgaagaaggctgagaataactgatatgactcaaatacacgaaatcattcgcgttgcatcgaggcggcaactgagtgaactcccatgagcatagataactatgtgaatgggatgagcgaaggcagtcaacgaagaggcagcgtgaaggataaagtgtataagcgtcccgtttcgatcttagtggtcatctacgcacaagatacgaaacgggtgctgatgttgcagcggcgtgacgatcccgatttctggcancggtaaccggcagcgtggaaaagggtgaaaccgcgccgcaagctgcatgcgcgaagtaaaggaagagtaccantgtgttgcgctg

SEQ ID NO: 1727 - DNA, 549 bp, Ctenocephalides felis
acgagtcatgtgcttccggatggctgacgacctacagcttccgatgtcagccagtcgattattcgaggtcgcccgaagccatgcggatggtgcatggctgttggtggtactacttctcgaagttcacggagtttttcgatacgattttcttcgttttgcgtaagaaaaacaaacatgtgtcgacactccacgttattcatcacggatgtatgccaatgtccgtctggtttggcgtcaaattcactccaggtggtcacagcaccttttttggcttcttgaatactttcgtccacattatcatgtattcttactacttgcttgccgcacttggacctcagtaccagaaatacttgtggtggaagaaatacctgactggtcttcaaatggtacaattcgtcctggttatgatccacgccttccagctgtgtcattgaatgtaattacccacgtgccttcgttggggatcggcatgcatgcagtcatgttctacttctattctctgtttctacaaacagacttacacaagaaagaaagaagagaagcgatgaa

SEQ ID NO: 1728 - DNA, 549 bp, Ctenocephalides felis
  misc_feature (480)..(480): n = unknown
  misc_feature (531)..(531): n = unknown
  misc_feature (543)..(543): n = unknown
aatttcctgtgaggtgattaccctttcaagcaatattcaaacgtaactatcctttaattttcggatccagcgcatcgcgtaaaccatcgcccaacaaattgaacgccagtacggtcagaaaaatagccagggccggaaaaacagcgacatgcggcgcgataaccatatccgctcgagcctcattgagcattgctccccactctggtgtcggcggctgcgcaccgaggccgagaaatgagaggctggcggcagagataatcgaggtaccaatgcgcatggtgaaaaacaccacgatagaagagacggtcccaggcaggatatgacgcaacaaaacggtcatatcgctggcaccaatactgcgtgctgactcaataaaggtttgctgtttcaacaccagcgtgttgccgcgcaccaggcggcaaacgcggggcccggtacccaattcgccttagtgagtcgtattacaattactgccgtcgntttacaacgcgtgactgggaaaccctgcgttcccaacttaatcgcttgcanacatcccctttngcagct

SEQ ID NO: 1729 - DNA, 549 bp, Ctenocephalides felis
aatactctgcgcttcgtcataggcttcaatacgcgccgccagctgctgcgaagagagcgccttacgcaatacgctgtcgaatttcggatcgcaccagtgggcgaggttggtctgcgaatgaattgccgcgcagctcagtaacggacggaagaaactgtccgggtcgttactgtccgtcgcccaaccggataacgtcagatcatggctcatatccatcaaccgcgcctcctgaaagcgaccttctaccggcacaatcaccacttttacgccaacctgcgccatatccgcctgaatcagttcggcagttttcagtggactggggttccacgcctgcgaacgtgtgggggcccggtacccaattcgcctatagtgagtcgtattacaattcactggccgtcgttttacaacgtcgtgactgggaaaaccctggcgttacccaacttaatcgcttgcagcacatccccctttcgcagctggcgtaatagcgaagagcccgaccgatcgccttccaacagttgcgcagctgaatgggaatggcaattgtagcgt

SEQ ID NO: 1730 - DNA, 549 bp, Ctenocephalides felis
gaaagggatggcgtcttatgccctaatatggcctgtttccagtattatacaacagacaatggaaggaaaaagattagaaaattacgattggggtcgttgtttacgattcagtttatacggatgcctatttactgctcccactctgtatggttgggttcgattatcaagttcaatttggccacacaataattttaggacagctgtaactaaagccctcattgaacaagttacatatggaccattcgctcttgccagtttcttctttggaatgagcttgatggaaacacatagtgtggacgaagcagttaaagaagttaaagccaaatttttgcctacttataaagttggtgtatgcgtatggccgtactccaaacaatcaatttttctctagtaagtgaatcaaacagggtaccttttgcagttgtgcagtttgatgtggacatcattcttggcatatatgaaatataaaaatgcccgatggaatcgccagcaaacacggcaacagcctcttgggaaaacaatcaacgcctctaaccatctttgataagt

SEQ ID NO: 1731 - DNA, 549 bp, Ctenocephalides felis
  misc_feature (137)..(137): n = unknown
  misc_feature (164)..(164): n = unknown
  misc_feature (169)..(169): n = unknown
  misc_feature (171)..(171): n = unknown
  misc_feature (174)..(174): n = unknown
  misc_feature (185)..(185): n = unknown
  misc_feature (187)..(187): n = unknown
  misc_feature (190)..(190): n = unknown
  misc_feature (197)..(197): n = unknown
  misc_feature (206)..(207): n = unknown
  misc_feature (210)..(210): n = unknown
  misc_feature (217)..(217): n = unknown
  misc_feature (220)..(220): n = unknown
  misc_feature (223)..(224): n = unknown
  misc_feature (227)..(228): n = unknown
  misc_feature (234)..(235): n = unknown
  misc_feature (241)..(241): n = unknown
  misc_feature (243)..(243): n = unknown
  misc_feature (245)..(246): n = unknown
  misc_feature (251)..(253): n = unknown
  misc_feature (266)..(266): n = unknown
  misc_feature (276)..(276): n = unknown
  misc_feature (290)..(291): n = unknown
  misc_feature (293)..(293): n = unknown
  misc_feature (297)..(297): n = unknown
  misc_feature (302)..(302): n = unknown
  misc_feature (310)..(310): n = unknown
  misc_feature (317)..(317): n = unknown
  misc_feature (325)..(325): n = unknown
  misc_feature (327)..(327): n = unknown
  misc_feature (336)..(336): n = unknown
  misc_feature (343)..(343): n = unknown
  misc_feature (347)..(347): n = unknown
  misc_feature (359)..(359): n = unknown
  misc_feature (362)..(362): n = unknown
  misc_feature (365)..(365): n = unknown
  misc_feature (369)..(369): n = unknown
  misc_feature (376)..(376): n = unknown
  misc_feature (378)..(378): n = unknown
  misc_feature (388)..(388): n = unknown
  misc_feature (398)..(398): n = unknown
  misc_feature (409)..(409): n = unknown
  misc_feature (420)..(420): n = unknown
  misc_feature (423)..(423): n = unknown
  misc_feature (437)..(438): n = unknown
  misc_feature (450)..(450): n = unknown
  misc_feature (454)..(454): n = unknown
  misc_feature (459)..(459): n = unknown
  misc_feature (464)..(464): n = unknown
  misc_feature (472)..(472): n = unknown
  misc_feature (474)..(474): n = unknown
  misc_feature (500)..(500): n = unknown
  misc_feature (509)..(509): n = unknown
  misc_feature (521)..(521): n = unknown
  misc_feature (530)..(530): n = unknown
aaacgcctgtaacgctggaagccttagccgaccaggtggcgatgagtccatttcatctacatcggttgtttaaagcgactaccggaatgacgcctaaagcctggcaacaggcctggcgcgctcgccgtttgcgcgantcgctggcgaaaggggagagcgtgacnacgtntnttnttaacgccgantnccngcagggngcagttctnntcnaaaattncanaannctnngcatgnnaggtananannttccnnncgggggggaaaanatgggggggngctttcgctctgtnngnttgngatcnggctcttnccctggnggcaaaangngagcggatntttgcgntatnttggtggcccgnccncantccnccttatngngagtcatatnacaatacagnggccgttttcnacagcgtgganagngaaaaaccggtgtnncccctattagcntgtngaaantcccnttttccgntngggataataaaagggccccccactgnccttttccnaattgccccccnatggggaangggaatttgagggttattt

SEQ ID NO: 1732 - DNA, 549 bp, Ctenocephalides felis
  misc_feature (15)..(15): n = unknown
  misc_feature (470)..(470): n = unknown
  misc_feature (533)..(533): n = unknown
  misc_feature (546)..(546): n = unknown
  misc_feature (549)..(549): n = unknown
caacgcttgtggaantgcaatccaccaaatttgaatgccaacttgctccagttggagatccgaacatgaaggttgaatggttcctaaatggcaagcctttacctcacaaaaatcgtttcacgccgatatatgactttggatatgttgctatgaattttggctgggtctaccccgaggatagtggagagtatttatgcagagcaacaaatctttatggtatggatgaaactagagcgattataaaaactgctggtagaccaggaatcatatatgattcacaacttcccaaacatatgaagagcattgaaagaattagggagatggaagcagcttggcaaattgtgccggacgaacctgatgaagaatctaaacctaatgtgcacctgtgtttgttagcaaaccagaccctgccaacggaagaaggcgaatggctagattctgctgtagagtacaggtcatccacgtcctanagttatgtgggtagggtaatggtacactgagtcaacggtcaagattaaattacatatgatggnatgttcacatggnttn

SEQ ID NO: 1733 - DNA, 549 bp, Ctenocephalides felis
  misc_feature (501)..(501): n = unknown
  misc_feature (507)..(507): n = unknown
  misc_feature (527)..(527): n = unknown
  misc_feature (540)..(540): n = unknown
  misc_feature (549)..(549): n = unknown
aagttgtcgacatgcttgcactggatgccgatgttgtatgcagatgtgcgggtggaaataatgctgggcacactgtagtggttgaaggcactgaattcgatttccatttactgcccagcgggataatcaacaaagactgtatttctattattgggaatggtgttgtcattcacttgcctgttttattgaggaattggaaaaaaatgagaagaaaggtctaagtggttgggaatctcgtcttgtaatatcagatcgggcacatcttgtattcgacatgcatcagcaggtcgacggcatgcaggaatcagaaaagggtggattaaccattggcacaaccaaaaaaggcattggtccgacatactcttctaaggcaacccgtaatggattgagagtgggtgatttattgggagattatgatttgttcagccgaaaatttaggcagtggctgctttgtccaaaaatgtttcaagtcttgaattgccgtggaagggaattgaaagnatcgcnatttgcagcaattggcaccnttgtaaggatctnatcgatttn

SEQ ID NO: 1734 - DNA, 549 bp, Ctenocephalides felis
  misc_feature (489)..(489): n = unknown
  misc_feature (496)..(496): n = unknown
  misc_feature (523)..(523): n = unknown
atgatatttcacaagctttaattccatattggagaaaagactgcatgagaaatgaactgaaatcccttaagaaaacattagatgacaaagatagaatggcaaaagctgctgttatgaatgacattgttgagaaggtaaaagaattgtgcctttcaagtgaatcagatgtatttgttaaacaactgcaagcagattcaaacactaaagccttagatgctgctttaaaacaaataaaattattgaaaccagatgcatcagccatgtttttctctgttgaccaagacagtggtaaaatattctgtttagcttctgcttccaaacaagcaattcaaaaaggattaaaagcaaatgaatgggttaatcatataacaaaaatcataaatggtaaaggtggtggtaaacctgaatcagcacaagcattggtagcaatatcgcaaaaattgatgagtgttaatagctgcaaaagaatttgcagatttgaaatactgnaaaatgnttttacttctgcattgttgaaacattnactatatcttagcatttatccgtatt

SEQ ID NO: 1735 - DNA, 549 bp, Ctenocephalides felis
gcaacaacaacctcagaatttacatcaccacaatactagtcagcaacatcaccatcaacaacacagtagtaacaacaatatatccagtgctggcaacatgaatccgcaacatgtgaatagtcatctttctcaccacagtccattatcttcatccatgagccatcatcatacaatgcacacaccttcgtcgatcaattcggggtatcagcatgtgaaaaatgaacctagtgaatacgattacatgaataattgtcttcctggaagttatttcacaggaaccagttttggtactcccctgagtcattcacagagcagtgctgtagattccctgagtgggtaccatcatcaacacaatgttatccaagccgctaaattgatggcaacttcttgaaattttggtttgaaataagtaaaaatactaaagactaataaaaaatgtaaatgatatagaagtcaacatatttgactatcaaaatataatgcaaaaaaatgttgtgtgacaacattggatggcaagtagcaaggcaatatcaagcataattacataat

SEQ ID NO: 1736 - DNA, 549 bp, Ctenocephalides felis
  misc_feature (3)..(3): n = unknown
  misc_feature (488)..(488): n = unknown
  misc_feature (533)..(533): n = unknown
  misc_feature (536)..(536): n = unknown
atngaatgatggcagttactgatcctgcattatgtagaagagttgctttaagacatacctgttttttagcagctttgtcattatcagctccttttctagatgttactaattattggtttgctgctgaaacgttaccattgaacggatactttatgtacttagcttggaaattttataaagaatcggacagtaaaagttctagaaaactatttagattttcactaattcatttacctgcattgatgttattatttttattaaataaaaaggaatggttttttacgaaagactcaacattggaaacacctttggatatcgatgaacacaataaaactcaaacaataagcaataaacctgcaaaacaaacagttgttgtaccttcagctattttagataaaatgtaaataatatataacaaaaaatgttttagtaaaaaatagaacaattaaagatattatgagaacaaaaaaaaaaaaaaaaaacctcgnggggggcccggacccaatcgcctataggagcgatacattcctggncgngtttacaccgcgg

SEQ ID NO: 1737 - DNA, 549 bp, Ctenocephalides felis
aaattttcttttaataagaaaaatttattattaagtttattaattttagaatataaagctttaattatatttttaattttatatttttgttttaattatataatatttgagaattatttttgtaatttttatattgtatttacagtatgtgaaggggttttaggcctttctattttagttgcaataattccgtactcatggtaatgattattttaaaagatttaatataatacaatgttaaaatttttaataataatattttttataatccctattattttattaaaaaattgttattgattggttcaaacaatattatttataatattatttatttatataattttaggaataaaaagaattataattgttaatattagattaaattttggttatgatattatatcttatagattgaatttattaaggatttgaattattattttaatattaatagcatcaattttaatttataaaaataattataatttaaattatttttattattattaattttttattattaatattatttttacctttagtcat

SEQ ID NO: 1738 - DNA, 549 bp, Ctenocephalides felis
aatgctacactggctaccactaaccctatgtatgtccagatgcgaagagggaatgtggaaaagcttgtaataccctcaagtgctaaattccaaagtttccatccattaaattttgtatctccagcaattctttccgctcgcacgtattcaacaatatctgtctttcctcctacccagctcagaatacctttcatgaaaaggtttcgttctggcataagtttaatattttcgacaacatcacggctcatcagcctgaaatcaccaacattctcttcaattttaggattgcttattttattgtggagcttatagaaccactcagccgtttttcgcttcaggcgtccatcagttgagcggtcagatcttttagcaagaaccatatcagcacctgcttgccatttttcaataagatgaggaataacctcaatcgggtcttgcaggtcaacatcaattgggattatcgcatcccggtacccaattcgcccttaggagtcgtattacaattcactgccgcgtttacaacgcgtgactggaaaaccctgcgtaccc

SEQ ID NO: 1739 - DNA, 549 bp, Ctenocephalides felis
gccagacggagggctaacactgcctttaacttttcattactccagataactttcaaaatcaactgcaatcatgtccgacgaggaagaggtctacagtgaagaagaggaggaggaggaggaggtcgtggagcaaaaacacacgaccaaagtagaaggcgatgcagctgctggagacccagaattcatcaagcgtcaagaccaaaagagatcagatctcgatgatcaactcaaggaatacatcttggaatggcgcaaacagcgtgccaaggaagaagaagatcttaaacgccttaaggaaaagcaagctaagcgcaaggtatcccgcgctgaagaagaaaagcgtatggcccaaaggaaaaaggaagaagaagaacgcagaataagagaaattgaagaaaagaaacaaagagacattgaagaaaagcgtcaacgtctcgaagaagccgaaaagaacgccaggctatgcttcaagccccaaggatgccacaagaagggcccacttccctcccaaaagacagacttcactgtttctgccaattgaagaacaag

SEQ ID NO: 1740 - DNA, 549 bp, Ctenocephalides felis
  misc_feature (534)..(534): n = unknown
  misc_feature (542)..(542): n = unknown
aaggaaaagctgtttttgaaggtgaagcaacttcagaagaggctcttaagaaattcgttcaatcacaatcgttgccccttatggtagaattcaaccacgagactgcacaaaagatctttggtggagatattaagagccatttattattgttcctgtcaaaggaaggtgggcattttgacagctatgttgagggagcgcgggaggttgcaaaagaattccgcgatcaagtactgtttgttacaatcaacgctgatgaagaagatcaccaaagaattttggaattctttggcatgaagaaagaggaggtgcctgctatgagattaatcaagttggaagaggatatggcaaaatacaaaccagctacaccagacctttcagcagaaaatattaaagaattcgtaggaagctttattgaaggcaaattgaagcaacatttattatctcaagatcttccagaagattgggataagaatccagttaggtttagtcagctccatttgatgaagtacattcaattcagaaaaggtggtttgnggaatctatgctcca

SEQ ID NO: 1741 - DNA, 549 bp, Ctenocephalides felis
aattgtccatcaaacacgtaatacgttttcaactaaagaacactggctgtggtgttattgggttatttttctcggctcaatcacggtactgcaggggatatacgtcttagtcagttccgatgcaagcgcccgactggctcccggcattattcttatttgcctcggaatgatctgttacagcatattctcaaaagtctggctactggcactggtatggagacgtacctgttcgttagccaacagaataccgatgattcccgtcttcacctgcctgttttgccttttcctggcatcgtttcttgcggaaatggcgcagaccgacatgggatattttattccttcgcgagttctggtcggtttgggagcggtatgctttacgttgttctcaatcgtttcaatattagaagcgggttctgctaaaaaataattgcaacgtaccggataaaaccagcgttgaccatttgcgtaacgctggtttttcttaggcatcatgaaataacgcacattaatgcatagtggtaagtataaaaaacagcaagtactgttttt

SEQ ID NO: 1742 - DNA, 233 bp, Ctenocephalides felis
tcacggttttagaaatggaagtaggatcaatatcgatatgcagaacagtggcatttgggcagtactttgccagattgttcgtcgttcggtcatcaaatcgtaccccgacggcgaaaatcacatccgcgttatgcatcgtcatattggcttcgtaggtaccgtgcattcatcaccatttgctgcacccgcagagcgctaaggcgcagttcattcatctggttaacatactcaag

SEQ ID NO: 1743 - DNA, 549 bp, Ctenocephalides felis
  misc_feature (542)..(542): n = unknown
aagtcgctgaacataccaacctcgaaacgcactttatcgattccagcggtttaatctcctgggacctgttcaagcaggatgccgattatccgtttgtggactggaatttctccggcaccacggaagaagagttcgccacactgatggctatcagaaaaaggccatctctcagcgcctctgaacaaggtcaccaatgctgagatagctgaagagatggcggcccgttttgcccgttgctgctgtgcgaatttatccgcagtgtgaacaccgttggcaaatcggcattcgtggaggccgtcggtcgggcgagcgatgatgcggaaggttacctggattttttcaaaggcaagataaccgaatccgttgaattacatcacaccccgcgagagtcgaatcaaccaattttgttttttttacattttatacaaaatttataactaagtatataagtgttgtatttggtttgaatattaaatgcagtatacctttttattaggaaactacaaacattcttgttatagataaaatataatttaaatatntgttgaa

SEQ ID NO: 1744 - DNA, 549 bp, Ctenocephalides felis
  misc_feature (493)..(493): n = unknown
  misc_feature (527)..(527): n = unknown
  misc_feature (536)..(536): n = unknown
aacacgctggctgacaaccgcacgggcagtcagagcaccgttgctgttgaagacttcaatccagtcgttatcggcgatacccagatctttggcatcggcttcactcaaccagaccaccggaccaccgcgacctaaagtcagcatcagcaggttgtcgctgtaggtggagtggataccccacttctggtgcggcgtcaggaagttgagcgctttttcctggttgccgttggatttctggcctatcacttctttcaccgaacgggtgtcgatcggcggacgataaaccagcaggctttcaccgaaatcacgcatccactggtgatcctgatacagttgctgacgaccagagagcgtacgccatgggatcagctcgtgaacgttggtgtaaccggcgttgtaagaaacgtgttcatcttcagaccagaccaggtcgggctggagataattttgcgcggctgtgcctgaatatcgcggaacggatcttctcgtcttnttattcagcgccagatgcgtatggcacgaccggnaattcgttnaggcagccaagct

SEQ ID NO: 1745 - DNA, 549 bp, Ctenocephalides felis
  misc_feature (531)..(531): n = unknown
ccgcggtggcggccgctctagaactagtggatcccccgggctggtactttgccaactatgacccgcgtatgaagagatcgcgcataaagccgagctttttcgccaacaaacgggaattgcaccgtttattgtggttttacccgacattaataatgaagccagtctcagacaaaatggtaaagcgatgctggcgcatgcgtcatcttcattgagtgatgtaaaaggaagtgttctgttactatttactacccgcgaaccacggttaattatgatcaccaacggccaggttgaaagtggtctggacgataaacatctcggccttctgatagaaaatcacacgctggcttatttaaatgcagatctctggtatcagggaatcaataatgcattggctgttctacaagcacagatattaaaacaatcgacgccgcactaacgtattatccgcatccaggcgcgggctgcacgacttgttcagcggcatggtgccgtatttatccagcgccagcgagaaacctgctccgtacccgngtgccggaagccagatgc

SEQ ID NO: 1746 - DNA, 549 bp, Ctenocephalides felis
aatttctatcgttatacgaaaagataatcaattccgctagccttaacgcgtgaattattgtcttatcacaacttatcggcaggcgctttcccgcctttcgggtcaaggcccgcatcactcctcaagaatagtttttatcgcttcccccgccattgcagctgttgcacagagttgttctatagagtgcccctctcgtgccttcgcagaaagcccagacatcacggtactcataaaatcagtcacacattgtgcgcgttgtggatgccgcctggcgatgtagtcataaatggtcgtttctgcggcgtgataatattgaacggcaatatcacgcgcttgtggatcatgactatgaataccttcaagaaccatacagccagcgcagccgccgttttggctatatctgcgcgccgcttcttttaatacctcaaccaggcactcgcctaccggacgatcatcacgaagaatatcggcaagcggaatagcttccgtaccgcgtattcattgagtcacggttaataaccagcttactgcaaaaccggtagaggtcgg

SEQ ID NO: 1747 - DNA, 549 bp, Ctenocephalides felis
  misc_feature (470)..(470): n = unknown
gaaataatgagagtattttaatatcatcacaattacaaatacgtttggcaaaatgattaataggtttaaatatatttattctaatacaaataagttaataaaaaatacaagttttcaacaaacaaaacgaagttatacgatgcgaagaggtgcatacgatggcgaaggtaaaactgttttgcgtttattaaatcaagatgccgaaatgggcctgatgattaattcatatagtcaagttggtttttccctgaacaatggtgtttcagtaatgggtcctgtagcgatatttcccaggactgttctatcatggaatgtaggaaatagtgaagacataaatgaggcttcattatctttattttataccttagatccaaaattggatgttcttgttattggtatagaacaagaaagtgttaatcccaagttaaggcagaggattatggaaattttacgccaaaaagaattaatgntgaagttttacctactgtgttgcatgcactacattaactttcttatgcaaaagcccagcgtgctgggcatattcccctt

SEQ ID NO: 1748 - DNA, 137 bp, Ctenocephalides felis
  misc_feature (18)..(18): n = unknown
  misc_feature (132)..(132): n = unknown
accaaccatgacgacacncgatgcatcctttcttctcctgatcgaaggcatcgaaggcattcttgagtagtttgatttgatccttgtcgagctcctccattgttactgtagatcacagacgacgctttcgtncttac

SEQ ID NO: 1749 - DNA, 193 bp, Ctenocephalides felis
actgattttatacgaaatttatagattaaaatcaacgtgtattaattttctgtcaattattgatcaatacataatattataaaattgttgtaaatcattatgttacataatatatataaagtcttgttttaacttatttataataattataataaaaacataaacatcaaaaaaaaaaaaaaaaaaaaaaaaa

SEQ ID NO: 1750 - DNA, 500 bp, Ctenocephalides felis
  misc_feature (68)..(68): n = unknown
  misc_feature (483)..(483): n = unknown
accaagtgtggccaaagacaatctttattgaaatggtaacaatcataggcgcacaaaaaatccaactncagataattatctaattatttcttactagggggtttgaattcaaatttacgtgatttaagtgctgtccatttgtgtcttttcagataaaaggccaatgcaaaaagcattgaaaagattccaatagccttaatggtcattttcttacgatcatcatgttcaggctcagatgcccatttcaagaatgtagaaacatctttggcgagttgactggcagtggctggcgttccatctgaatattccataacctcattatacaatgcttgagccatagaaatggctccccctgggaaatatggattgtaatactgccttcccttagaattacacctgctggtgggtctgtgtatccagtcaggagtgcaaacaagtagtcttctcctccatgacgagccaatgtaataaaactcaaatcangtggaaaagcccattat

SEQ ID NO: 1751 - DNA, 500 bp, Ctenocephalides felis
acatataagcgaatttttttatatatatcttcaaaaagaaaatatccatatttttgaaacaatttaataaatttctgttcctttaatatttttatcaattcatatgacttagttatacaaaataatcatatgttacttataaacatgtatcatagaagttttacatctgactctgattgttataattaataaaataaaaaaaaaaaaaacatacatacagaagttttacattttattacaaaattaaatacataaatgtatataacttttcaaaattttattataaattcatagatgtttttcatgtttaattatgtgtttctaaccaatcggttttaataaaaattataagaatgtagatattgtagtaaatcgaacatttctgttcttcatctacaagatacaataaatagaaattataaatagttatataataattttgcatttttaatgaaaatcacactgtgtatcatagtagcacttccaattttgcaacaata

SEQ ID NO: 1752 - DNA, 252 bp, Ctenocephalides felis
acttgaacaattcgatgatcttctagttaaaattttactgttagctgctattatatctttcgttctcgccctttttgaagagcacgaagattctttcactgccttcgttgaacctttcgtcattttactgattttaatcgctaacgctattgtcggtgtttggcaggaaagaaacgctgaatcggctattgaagctcttaaggaatatgaaccagaaatgggaaaagtcgtccgtggcgataaggccggtgt

SEQ ID NO: 1753 - DNA, 265 bp, Ctenocephalides felis
  misc_feature (21)..(21): n = unknown
  misc_feature (40)..(40): n = unknown
  misc_feature (64)..(65): n = unknown
  misc_feature (223)..(223): n = unknown
cttcttataaccatgtaattntctacacataatgattatnttatttattcacgatatacaacanntgcttttttcttgagtgttaccgtctgctttttctatctcgactaacaaagcatggaatatttcagctactgactcattttgtttggcagatgtttctaaaaatgcggctttccaactatcagctaatcgtttaccttcatctgcacttatcattcgntccatatgtaaatcagttttgttacctactaacactacaggt

SEQ ID NO: 1754 - DNA, 305 bp, Ctenocephalides felis
actacatcaaaatgtgtgcttttcctaagcagctgcaatacccaaagcagcaccagctgcaaatgctcctataaaaatatgtatttcttgcaatttaaattcttcttcacctgtaagaccgtgataccattttttggcttttctttgatttttctttagcaattcctctgctttgtcaattttcctatcaacaaatctctcaattttatccattaatttgggagtttctccagtaacagcctcttcaattttatctgtcaccttatcagcctttttagttactttatcccagtcaatagaaatgt

SEQ ID NO: 1755 - DNA, 500 bp, Ctenocephalides felis
accattatataagtcaggaaatcgtcaatcaacagcaaactacagacccatagccatactgccaatattttcaataattatagaaatgttgttagcattaagaattacaagtttcttcgatgctaataattattttgtaaaaaatcaatttgaattcaaaaagaaaattatcacaattgatgctgtgctagactttttgaactttatatcaaattcactggaagatcataaacactgtggggcactattttgcgatctcagcaaagcattcgattgtgttccacatgacatatttctcaggaaactggaatattatggatttaggggcgtagcccttaaactgatgcaatcatacctatgtaacaggtatcaagtttgtggaatggaacaataaacgaagtgagatagcaagattaaatgcaggcaatgcccaagggagtattcttggaccacttctttttatcatatttgtgatgatctaccaccgaacattagctgca

SEQ ID NO: 1756 - DNA, 486 bp, Ctenocephalides felis
acggtctattaacaaatattctgaaatcaaaatcaaactaatagcggcaagatctcgagtagcaccattaaaaaatattacgctcccccgtctcgaactttgtgcggcacaattgctagcaaatcttgcgcaaataactaaacgtgcattaaatatcgcgtttgataaagaattctattggagcgattccacaatcactctttcgtggataagatctccatcttataaatggaaaaccttcgttgccaatagagtttctgatattcaaacaaaaaccgacgcaaataactggttacatgtccgatcggaagacaatccagcggacctcatatcacgcgggtgctatacacatgatttattgaattcatccttgtggtgggcaggcccatcttggctacaaaatccaactgaaacacagcgacgtgcaactgacaatatttcaattcctgaaactgatgtcgaaagtcgaatcacaagtttgacttg

SEQ ID NO: 1757 - DNA, 500 bp, Ctenocephalides felis
  misc_feature (183)..(183): n = unknown
accactgactcctgaatgttaaaaattaagtcgtttattgatttatcgatatcttcttcatttttcaatcgcatttcaagatttgttcgttcatttagtgtgttgcgaaattttttcccaatttgtgaatttattataaagtattctgttgttttttataggaattggtgcaattcctattgntagaatgattggagaatggtcggatgataaatcaaaagatggttttatttcaatgttcttatcatcaatatcctttgtaatgaagaaattgagcagatccggtattttattagtatcgctcggccagtatgttgggcttccagttgatatgtaagagagattgtttttatctattgcatttaataattccttgcctctagatgtaattaatcgagaaccccatcttgtatgtttgcaattgtaatctcctcctacaataaattttgggcctagttgtgaaagaaaattttcgaaatcaatctgttaatttatgtcgt

SEQ ID NO: 1758 - DNA, 270 bp, Ctenocephalides felis
acatgaacttaatcctgattttaaaccaccaaaaagaccatttaaaaggatggattatggtgctgccataaaatacttgagagaaaataatatcactaaagatgatggaacattttatgaatttggagaggacataccagaagctccagagcgcagaatgacggatgcaatcaatgaacctataatgctttgtcgttttccagcaggaattaaatcattctatatgtccaaatgccctgagaacaaagaacttactgaaagtgttgatgt

SEQ ID NO: 1759 - DNA, 500 bp, Ctenocephalides felis
acatttttacatttttaaatataatacaaccttatataagtatcacaccatcttgtatttatgaaaatagtctcgcaaactcttcgaagttgatgcgtccatccttgtccgtatcggccaacgtcatcaactcggtgacctgctgctccgtgacattttcgccgatcatctccatggcggttcgcaattcgtctcgggaaatgtatccattaccatctcggtcgaacaccttgaaggcagatcgtagatctttattgacatcatcgttggagtctgaatctcccccttgtctttgggttccgccttgcattgcctgaactgcttgaatctttgcgatccattgtaaaaactcggtctcgtctattaatccgctaccagactgactagcgtctttcatcagatcttgaataagttcatccctcacgtggattcctagattttttaacataaattgcaaccctgaagccgtacatgtccatcctggtgcgatccagcaaccc

SEQ ID NO: 1760 - DNA, 500 bp, Ctenocephalides felis
accaccgtctggaccgctaggatccttgatttctagggtaagttcaaatacttcttcttctacatctaccgttcgtattttaattttactcgattctttaacgactgtggttccgcgataccaaacgacatcaggcttgggcttagctttacatttacatttcattgttattaacgagcctgtttcattaggaataattcttggtttttcgatgaacgttggcgcgtatcctgcagcatcatcaccgctgtcgaagttcaagctgatagtcgcattgctttctccaagttcattctttgcagtcacacgatatttgccagcatcctcaacagtgacatttttaatctcgagtgaagcaaagtatgaatgaccatctttgtcaaccatcaacttgtgtcttggtgagtccttaacagggttggtattgtgaaaccaagcgactgtaggtttaggatcagcttgaattcggcattcaaagagcaaacgtttgcatcatctct

SEQ ID NO: 1761 - DNA, 500 bp, Ctenocephalides felis
  misc_feature (417)..(417): n = unknown
acctaacgatcaattcattacagattacttgaatgacggtaatttcatagactagcccattccaaaaattaagtattctgaagtgctctacgagattagtaacactaaattggtaaaaacacttggtaatgatgcgatcacatttggactaataaaacaccttcctgataaaggtaagagatttttaacgatattattgaatgccataatacggctgaagcatttttcttcatcgtggaaattggcaaaaataatcttaattctcaagcctggaaaaaatcctactgatgcagtttcctaccggcccattagtcttctatcttgcctctcacatttttttgaaaaagttattcacaaaagaatcattaatattttagaagataataattttatgccaaaacatcaatttgggttcanttagacaacactgagcaaaagaacaaatacacagagtagtggattcatttataaagcctttcacttaaaaaaaatggtcagcc

SEQ ID NO: 1762 - DNA, 500 bp, Ctenocephalides felis
acgggttgatcttagcagcctcagcatatccttttttccacatcctgtttttagcttcaaaataagatatgttatgtagtgccatcatttcttttatttctttatttgctttgaagaatttacattctttgtcgtttgcttgatggtttccatggcatactgcacatataaagtctgacacgatatggcaattttcatgagagtgttcttctgaacaatatcggcatcttatcttgcttttgcattagttttttatatgtccataacgccagcatttgtggcattgcattacagattgaatgtaaggacctacagcacacctaaccgaatacattgaaacgtattctggcagatagttacccctgaacactatttttaccatttgcgatttcatatttgtttattctaagtttttttaatgcatttgacctctaatattttgatatccgatctaataacatccatgatttcttgctcgtcatgtcgggttcaacgttaaa

SEQ ID NO: 1763 - DNA, 500 bp, Ctenocephalides felis
acctgggcaaaggtggagaagttgccaaattaaccaaagaagcaatgaaaggcagcatgtccttccaagaagctctcacaaaacgattagatataatcagaccttcacaacagaatatttcagacttcatcaaagatcatccatcaacactcacacctggaataaaaaacttaattgcatccttacatcggaaaagaataccagtatatttggtgagtggaggcttccgatcactcatagaacctgtggccaaagaattaggaattccatatgaaaatatatttgccaatagaatcatattttattataacggagattacgctggatttgatgcaactcaaccgacatctcggtctggcggcaaggggcaagttctagcgttgctgcggcagcaaaagggttacagacacattgcaatgattggtgacggtgctacagatttagaagcacaggctgatactttcataggttttggcggaaatattgtcgagaagaagtca

SEQ ID NO: 1764 - DNA, 315 bp, Ctenocephalides felis
ctcgtgttatttttttaagttgtatttttttgtttagttttaattttataaaatgtgatcccccgactgtaactttgccccagggcgaattggttggaaaagctttgacgaacgaaaatggaaaagagtattttagctacacaggtgtgccttatgctaaacctccagttggagaacttagatttaagcctccacagaaagctgagccatggaatggtgttttcaacgccacattatacggaaatgtgtgtaaatctttaaatttcttcttgaagaaaattgaaggagacgaagactgcttggtagtaaacgtgt

SEQ ID NO: 1765 - DNA, 500 bp, Ctenocephalides felis
acccctttaagtgaaagattatgtatttgggagaaggctgcagatttaatggccggtgtttatagacaagaattaaatgctgcaaccatgttaggacaatcaaaaacagtcattcaagctgaaattgattctgcagctgaattgattgatttcattagaatgaatgccttcttcctgaaggaattaactaaataccaaccaattagcgaagatttgagtgttacaaggaattctatgcgtttccgaggtattgatggatttattgctgctgttagtcctttcaactttaccgctattggtggtaatttggcctatacaccagctttaatgggcaatggtgtattatggaaaccatcagacacagctttactgtcaaattggatcatattcaagatcatgcgtgaggctggtcttccaccaggtgttgtcaactttatcccttgtgatggtcctgtatttggtgacactgcactgcctctctcatttagctggcattaact

SEQ ID NO: 1766 - DNA, 456 bp, Ctenocephalides felis
accacgtatctaatataatttaaaacttatttgagttatgtaaatcaataatctcaagtataactggcaaattaagatttgtagaaaaataaccaaagtaatgcgacaaacctttacatcacaatgcttctaggttggaatttgtttcaatggtcaactttttctcctgactcatttcatatgcaaccgcccttccagcttgatataattgtgttagtccaacaaacatattaacagcaaacaaactccaggtttttggaattatgactaaggagtatctggcccatacgaatccagttacagccaatgatcctgattgtctaactgatagttgctcagctggcctggataaatctcctatgccagctataaccagaccccatttaaaaagaggtgcccaaaagaagacagtttttggacctgtggtgaattccataacggtaaagccgattttgg

SEQ ID NO: 1767 - DNA, 500 bp, Ctenocephalides felis
acgcaactaatgcaatataaatttgtttcaagtcaacaatttaacaccaaaaacaataatagatcaaaatggtcctttcaaatagctgatataatgtataatgtttgagattaggttatataaaagttgaatgttttttgattctttaataaaaatatccatcactgatataactaaattacgcagtaatcataattagaattatgtctctagcaacagttattctttctcagcaatagcggtcaagtgaacatctaattctgcctctgtcaaaaccctaaatttaagattttctttcgtaaccaccgcaacctcaatttctgaaggtttgaagtcaacacataacactgttgataaacatgaaattgccaactggacagcttcatcaaatgtataatcctgtttcttcttcagttttttctcaagatatccattggcttcagtttgctttacacccacactaatggctctaaaaccacagcagtaaccagcaggatctg

SEQ ID NO: 1768 - DNA, 549 bp, Ctenocephalides felis
  misc_feature (535)..(535): n = unknown
gataaacgatcacctaaaaaatacggtggtaacttagatacaactggaagtccttccagatctcgtagcgctaccaaagaattaatattgcccccagatgattctctaatgtgcaaaccagattttacaactcctttaaaagatagatctgtaaaagatggtgatagtttaacattaacatgtaccgttaagggtgacccagaaccacaagtttcgtggtttaaaggcggcaaggcattgagttcttccgaaattatggacttgaaatataaaaatggcgttgccacattatcgataaatgaagtattcccagaagatgaaggtgtttatgtttgtaaagctaccaattcaattggagttagtgaaacaagttgtaaattaacggttaaaccaatggcaaacggcaaggtgtctaagaaagctcaggagacaaaccacctaaaatagtgagtcacttagaatctaaatacgtcgaagatggacacccgcacgttatcttgtagatatagatgctgagaaatcatgtcgctggtgnacataccaagaaat

SEQ ID NO: 1769 - DNA, 549 bp, Ctenocephalides felis
aatcaccgctgtaaccaatgcgcgagttaatctcaaaaggcgtttcaccttttgccatatcaaacagtggtttgcttacttcgttattaaccagcgtggtttgaattgatgccatcgacgggatcaggttcagttttttaagctgggcaagcgggaagggaccatgatcaaccgattcgttgaagatgacgctctgaccgcttttaatccacggattttctttcccggcaatgggtttcaccaacagttgcaactggctgctgaatacgccgcgatgatagttttgataactcacttccaggttggattcaggagctgtcagtttgagttgcgcgttcgcctgcgcgaccatgtcttcgagatgggtttcaatcttcttgcctgtataccatgcgccgctgtccagactacgcctagcgcaacaatgacgcctaccgctaccagcgatttattcataatgattatcataaaatgaaatcaggcggactgccgctgaaggtgtataagcctttaataagcttacaagagatgtaatttttcagtagctct

SEQ ID NO: 1770 - DNA, 549 bp, Ctenocephalides felis
aaggatggagtcactgtagcgaagggtattgatctcaaggacaaatttcagaatattggggccaaattagtccaagatgtagctaataacaccaatgaagaagctggtgatggtactactactgctactgtgcttgccagagctattgcaaaggaaggctttgaaaaaatatctaaaggagcaaatcccattgaaatcagacgaggtgttatgctggctgttgatgcagtcaaagaatctttgaaaggaatgtcgaagcctgttactaccccggaggaaattgcacaagttgctaccatttctgccaatggagacaaagctattggaaaattgatctcagatgcaatgaagcgtgttggaaaggaaggtgtaataacggttaaagatggaaaaactttacatgatgaacttgaggtcattgagggcatgaagtttgatagaggatcatttcaccttactttatgaattccagcaaaggtgctaaagtagaattccaagatccttattttgtcagtgacaaaaaatactcagtcaagcatattctgcttg

SEQ ID NO: 1771 - DNA, 549 bp, Ctenocephalides felis
gctcaacgagtaataatggtcagagcgaaatattgtttttaaaaaattacgtcatacaaatatcgaattacttttgaatctaaaaatatccctggtgaacatttttgatattaagacgttttacatcgaaatttttaagtttgcattttggcgaaaatatttgttacgtgttcgttacggaagtttgcttaaaaactctggtgaattttgaactcaaaatagtgtctgttggtttttttaattgttgtgttgccgtgcgggtcgcagaaataaattggtgatatggcacaattaatatcagttcgattaaatcgaggagatgcttgtccgtggggattcagactccagggtggcaaagatttcggcactcctttggttattcagaaggtgaacagcggaagcccggccgagcgagctggctgcaagcaggcgacgctgcatcaaggtgaataacacagacgtctataatctgagacacaaggacgcgcaagacgcctcggcgcccggacatcttgaggtgcagtcaaagaggtggatcacatggcaccc

SEQ ID NO: 1772 - DNA, 549 bp, Ctenocephalides felis
  misc_feature (47)..(47): n = unknown
  misc_feature (495)..(495): n = unknown
  misc_feature (540)..(540): n = unknown
taagaaagttgctgaagaatttaaagaagttttagacaccttattgnggaatgatgaatatggtgtttggatggactacgattcagaaaatagaatatcgagaccttatttctacccttcgaatcttgctcctttgtggactcaaagttataaggacgttgagtgtgggagtggtaaaagtttgggagtagacaagaatgtgcaggataggattgagagggttttgcggtatttaaatagtccagatgtagcaataaaaagctacccaggtggtgtaccaaccactttattgaatacaggagagcaatgggacttcccaaatgcctgggcacctcttcagcatatggtgatcctgggattggacagcacagataatcaggaagctaaggatttgtcatttgatctttgccagaaatgggtccgatcaaatcataaagcttacttggaaacgaatcatatgtatgaaaagttaatgcacacatgctggggcaccangaaatggcggagaattgaggccacttggtttggtggcgaatggtnctattagac

SEQ ID NO: 1773 - DNA, 549 bp, Ctenocephalides felis
gccgtattcgcagacttataaattagtcgtcgtgggcggaggaggcgtcggaaaatctgcaataactattcagtttatacaaagttattttgtgacagattatgatcccaccattgaagattcatacacaaagcaatgtgtcatagacgacatcccagctaaattggacatcctggatactgccggtcaagaagaattcagtgcaatgagagagcaatacatgagaagtggtgaaggatttttgctcgtgtacgcagtgacggatagggctagtttcgacgagatgtacaaatttcacagacaaatcttacgtgtcaaagacagagacgaatttccaatgctgatggtcggcaacaaagcagatctcgagacgtctcgcgtggtgtctgttgaagaggcgcaaaatttgtcaagacaattaaaaataccttacatcgaatgtagcgctaaattgagaatgaatgttgaccaatccttcctgactagttagaattgcagaagatttcaattatcagaaaggcagatccaattaaatcaattataggataa

SEQ ID NO: 1774 - DNA, 549 bp, Ctenocephalides felis
aattattgccggatgtctgctggtgatgctgccagcgatgggcctgttctatgtatccgacctgatgggcggtgcgaaaaacctgctgatcggtaacgtcatcaaggtccagttccttaatattcgtgactggccgtttggtgcagctaccagcattacgctgactatcgtaatgggcctgatgttgctggttactggcgcgcttctcgtttgctgaataagaaggtggaactcgaatgatcggtcgactgcttcgcggcggttttatgaccgctatctacgcgtacctgtatatccaccatcagttcaagacgacgcagcacctccggccgggcatcatcctccgtcatggcacagagaaaatcattcagcgtccccggttgtgaatcttcatacacggtgatggtcccggcgtgcgatggtggaaaaccgtcaacctgcaggatgacactgtctgaccgtactccacatcatgctgtaacgcccggcttatccggatcttgacccacgtgttcaccaccaccgtggtgctgtacgtctggtttactg

SEQ ID NO: 1775 - DNA, 549 bp, Ctenocephalides felis
  misc_feature (549)..(549): n = unknown
gaaacgagtcgcatagtgcacttctgaatgtgacataatcccaaagtctaaataacaaaaatactatttagatggagagtgctatccctgacgtatacgtgaattgatacgtgcaccttttactatcaaggtgatacactcgtgcatcaagtgataaagagtgcctgcaatttatttttattttagtttgtccgtgaattgtgtttttcgttgtgtaacccaagcgccaaagtaacgccgaaacagacatggaggaaatattacaagaaattaggactataaaattcacacgggaggaagtggaatcgttgatttactggcgttgtccgcgtaagtctggcatcgtattcggcgtgtccctcgccctgctgctggcgttatcatgcttctccctaatcagcgtgttagcgtacgcttccctcacagccgtctgcggctgcatggccttcgtatctatcgcaacgtattgcaagctgtcagaagacgtccgatggcatcctttaaggagctgtggaaacagatgtcagtgtgtctaagaaaacccacagn

SEQ ID NO: 1776 - DNA, 549 bp, Ctenocephalides felis
gctgatggttgcggatccgctgagagcggatatagtgacgaacgcagtgatgaaagcgattgcgagactaaaaatttagctaatgattgtactgataatttagataatgatgttgaacatgtaggtagttcgaatgatattgtagaagaagatgagcacgtactgagtcacaataatgatgtagtagaagacgaaattgtgaatgtaataaattcgattgaaatagaagaactctctggtaatgacattaatgaaatagacggcgtggaagtagaagacgagactgatattcatattaacaaagaaaacagttgtaaatctgattttaacacaacgcaaattggagatggctcaaataatgtgacagtcgttgcaatccagataaagaaggagcagatagcacacttgaacttgaagcgcaatcgtgttcaagttctggatcttttaataaaatctctaatattgtaatgatgaaaaatctcagaatttagacaaattgacacatgcaaagacgataagttgtgcgtgtcagacctctcatcgcgagtt

SEQ ID NO: 1777 - DNA, 549 bp, Ctenocephalides felis
aacgaagaaaaacaagattaaaattcaacacggatcagctgtgtattgtattatatatttggataacaaagtatttgtatcgtttgcaaatggcgatattagtgtttacacaagagatcaaacgggttggaatacaaacgacccaacgacggtgtgcgttggttcaaatgtggccgcccgtactaagttgcttcccgtcgctagtcgattgtggtgttcggcgcataatcatatcaaaattatcaatacagaatcattacaagttgaacaaacgtttcaagtcaacaccgatatcaataagccaataacaaatatggttactggaaattcgggggtttggatatcgttgcaaaattccgcagttttaaaatgttatcatgcaaatacttacgaatgtgtctggaagtaaatattgctccgagtgttacaaagatgttagcggcttgcgatgatattattcgacaacataaagcagcgtgtttaagagtgcagcctgtagcttgcaaagattatatggataggaacagtgctggagtatattgcctccat

SEQ ID NO: 1778 - DNA, 549 bp, Ctenocephalides felis
  misc_feature (504)..(504): n = unknown
atacgtgataaggatgactacccatatataacattttgccatgttattatatattttttcatgctagcttcatagaaatttttcaaaattaacattaaaacattgttcatacatttcgtttaataatttttatgtttaaaactcattggtcaccttaataaatgtacataacttattatttctttgcaaatccagaattaggacatttttttcaagtatgtattatggctctcaaaatttagtttattcttatatcgggttttattttcctggacggttttcaaccgcaatcacagatatgatggacgtggagccctagcggatctccaagcccatgaagctatatcacattgggactacaatgaaggacttagtgatgaagaaagaagagcagaacagctttgcgatgaagagaggtcagagcgttgtatgagcggcggaagaagaagaaatatataaagaagaggtaatgaagagggcacaacaacagatcatgtgaaagtnatggcaagtgcattcaattatcagatgttggtggtgggatgatga

SEQ ID NO: 1779 - DNA, 549 bp, Ctenocephalides felis
aatttatttaatgatgagctttttactcagtaatataaaatattgaattgttatttttgtgtgttgtttaagataaaaagccgtatttattattacggctttaattaataaaaggcaggctgtattaaaattaatattcaaagcataaaccgatagccaataccggtttcagtaatgaaatggcgtgggcggcgggatcctgttccagtttttgtcgcagatgtcccatataaatacgcaaatagtgactgtgttcgaccgcgtttggcccccacacctggttaaggagctggcgctgggtgagtacttttccggcattgttgagcagcaccgccagcaggcggaactcaattggtgtgagatgcacctcttcctcaccccggtgaatcacgcgggcggctaaatcgacggtaacatcggaaaattttaccagcggatcgggcgcggtggtggagagtggcggcgtaatgcgactgctgtacttcggcgtgcacaacattgccatgctggcgtattatcgcgtatgggatgctgcgtgatggtgaggtg

SEQ ID NO: 1780 - DNA, 549 bp, Ctenocephalides felis
  misc_feature (176)..(176): n = unknown
  misc_feature (506)..(506): n = unknown
ggtacacaatgtacggtcccgatttatccattgattctgcaatatattcaaatcttgaaagtgacgaactaaaagaaattattcaggatgatgacaaatttgaagaaatattcaaggaattggcccaggttaaaaactgggaaaatcaaaaggaagcaatgatagaaagaaataangctcttgccgaagcaaatcttttacgcaatcctgacttagctgaaataaaagaaaaattacaagaactttctgaagaaggcaaacaattatgtaccagtatccaagaaatgcttgctgaaataaaagaaaaatctggaagtatcagtttggatacagctttagctctgttacaaacagcagctgcaacaagcgaagaagaatctgaaaatatagcagatcaattcatttcacgtgatattgatatagatgcatttttagaacagtttgcatcatcaagaaaagttatgcatttgagaaaagtcaaagctgataaaatgaaagacttcttnccaaagaaatagtagtatcaaataatcttatgtgcctagtgta

SEQ ID NO: 1781 - DNA, 549 bp, Ctenocephalides felis
  misc_feature (548)..(548): n = unknown
gatagttcatgctcgccggtccgtgaaactaccaaaaacaaaaaaaaagaataataaaaaaaaatcgtctcaattgaatttaatcggaccgtactaaaaaaaaagaaacttattactgttattgttgcgataatttcgaaccgaagaaaattaaattaaatccaaacctattgtgtaatggcgtttttgagatcgtctattcagtgtaataatttactaagaaagttcggcataataccaaacagtttgcaatcgttgtcgacaccgtgtgcgtctcatatacatggaataaatacagattcttcaaaaagtcaacatgttgcaagcccagctcaagcccatgtacagaaagaccctttggacatatcattcaacgatcacgttgcagccttcaaaagtaaaaagacaagtgagctcgttcgggcttcatcgtctatgcactatgcacctcagaatatcttgtggaaaataatatgaagctaatgaaaatatccaaggcgatcttaggcgagaagctgtcacagcctaatgaagcttcgtctatggcnt

SEQ ID NO: 1782 - DNA, 326 bp, Ctenocephalides felis
  misc_feature (220)..(220): n = unknown
aattgctcaccgtgtaaatcttccagcaccgtcaggttgatgcgcgagcgacgttccgctacttcctcgcgcagaccatcaagccctttttccagcagcagcgggaaattcaccgccaggtgcgcatcgccggaggtcatattgccttccgctttaatgattccggtcgccagcagacctttttgctcatcggtaaacatgccgtagcagcgatcctgtncggtctgaccgcgccaccacgggcacacttcatgcagaacgcgtttgttctcttcgctcaccgcaaagccagcaccgggacgatctgccagatcatcaatctcttt

SEQ ID NO: 1783 - DNA, 549 bp, Ctenocephalides felis
ggaacatctcctgaattacatatgctaatattgttttgtgattgtatgacacattatgtcacaatacttgatgatttggaaatgtatgagcagcaaaatccatttaaattatctgatttcgttgtaatttcaaattttttgaatatgtttttatataaagcgatactgggaaatctatttgatttgaaaaacctatcagggtgtccattatttgtgtcaactcatactttgttattagctttgtatagacgagattgtcgaagaccatttacaccaaactcacattggcttgctaaagatatcaggccatctacttttatgaatgatcttgacaaaggaaaaaaaactactcaggtgcttttacaaaaaatgccgcacataataccacatgaagaaagggtgcaattatttagaaagtgtgtgtcaaatgaaaaggctgtgttaggtttaactgaatcagcatgtgtatcacccaaagcactttgatactgtcatagagacagaattgtgaagatggatatcacagctgctgcgtgcaaccatgcttaa

SEQ ID NO: 1784 - DNA, 327 bp, Ctenocephalides felis
  misc_feature (48)..(48): n = unknown
  misc_feature (205)..(205): n = unknown
  misc_feature (214)..(214): n = unknown
  misc_feature (313)..(313): n = unknown
agttgattgaaaaggtctgatgtgcatgccattgcgcacctgaccggnggcggcttctgggaaaacattccgcgcgtattgccagataatactcaggcagtgattgatgaatcttcctggcaggggccggaagtgttcaactggctgcaaacggcaggtaacgttgagcaccatgaaatgtatcgcaccttcaactgcggcgttnggatgattnttgccctgcctgctccggaagtggacaaagccctcgccctgctcaatgccaacggtgaaaacgcgtggaaaatcggtatcatcaaagcctctgattccnaacaacgcgtggtt

SEQ ID NO: 1785 - DNA, 549 bp, Ctenocephalides felis
aatgttccaccagcaggggaaataatgttgttctggctatcggtcaccaccacgcccacgccaggacgtgacgtcttaatcgcctggggatagctggggtctgtggttgccgtcagactcaggttgacattaactaatcccgcgtttcccgtgttacacctgactggaattgcaagttctgccgtctggccccaagaggtttatgccctacaacacggaaattggcagcgaagacatcacctaaatcaacttcaattgtctctccggcattgacggaacatgagccaagtgaattgatcgtaccagacaggtaatacactaaaaccggtgtacctgtagtcgtgcaggaatcacctgcgggtatgttgtagcattcatataatcgcgccagcgccataggaggaatgacgaccgagccaacgaacggctgcaatattttagggaaaagctaccgctattaccgctgccccctgccactaaacgttgaccgcagggtcgaaattgcctcggttcccccctgtgcccacgttttcaaggagcccggtccca

SEQ ID NO: 1786 - DNA, 549 bp, Ctenocephalides felis
cgtttacgtggtggctctaatcaggcttttgttctaaaattttgctcagctatatttcttttattggattcatttggcctgcaacttatttagttttcaaagtatagtggcaggatagaacgtaatcatagaatttatgaaatttttcatacttcttggtcaaatctgtggtgatgtgttaaatattttcaatacggattagtgtatctgaaaatatatatttggcaaatttgttattaaatatttagttatcgcagacgcacagtaatacgaagtagtatttaatgaatactcggtactcttatcacaggatgctattgtatgaaatggggttttagagtagtcacctccgtctcgcatcagaatgctcactaggactgtctacaaagattctggtttataatgatctcacttgtttaatcacacgttaattacccactattgttgaatatatatatatatatatatatatatatatttatatatatatatatatatttatatatgtatatatatattatatatatatatatatatttatatatatat

SEQ ID NO: 1787 - DNA, 549 bp, Ctenocephalides felis
  misc_feature (12)..(12): n = unknown
  misc_feature (15)..(15): n = unknown
  misc_feature (17)..(17): n = unknown
  misc_feature (494)..(494): n = unknown
  misc_feature (538)..(538): n = unknown
ttccaaaatagnganancagttaattttagacaaatataaaataataaataaatcgaaataaagtttgatgaacaatatttattattaaattgcgattgcacaatttaagcagtataacgaaatggcgttacggattttgaagcctttaagaaactctcttggaatttgtcaagatatcaaaaaggcttcgacgctatctgcatttgatattcaacataaaacccctcttattaagcaatcagatgaaattccaaaagcacaatatgggggtcgtcacgcagtcacaatgctgcctggtggcggtattggtccggaacttatgggatatgtaaaagaagttttcagatatgctggtgtgccagtagattttgaagaaattacaatagatccttctgtacattcagatgctgatttagaatatgccatcacttcaattaaaagaaatggagttgctattaaaggtaatattgaaaccaaaagtgaatctgcacangtattatctcgtaatgtaccctgagaaacgaatagattatttgnaatgtttaaac

SEQ ID NO: 1788 - DNA, 549 bp, Ctenocephalides felis
  misc_feature (3)..(3): n = unknown
gtnagccaccattacatccggtgagcagtcaggtgcggtgatacgtggtgtttttgatgaccctgaaaatatcagctatgccggacagggcgtgcgcgttgaaggctccagcccgtccctgtttgtccggactgatgaggtgcggcagctgcggcgtggagacacgctgaccatcggtgaggaaaatttctgggtagatcgggtttcgccggatgatggcggaagttgtcatctccgcctctttcactcattaagactgtaaataaaccacctgggtctgcagatattcatgcaagccatgtttaccatctgcgccgccaataccggatttacgccatccggcgtggaagccttgcatagcttcgaagttttcacggttgatgtaagtttcaccaaacttcaccctttaatggctttcatcgcgacgttcagattttgggtatagattgatgaggtcaggccgtaatcactgcattagccattgagatagcatcttccagcgtgtaaatgcgcaactggcagcaccggccaaagtttctatgctatcga

SEQ ID NO: 1789 - DNA, 549 bp, Ctenocephalides felis
  misc_feature (17)..(17): n = unknown
  misc_feature (493)..(493): n = unknown
aatgcccatacctaccnttccgcgctgccccgtcgcctgctccgccatatcaaccaacgtggcgatcgtttcaatagtctgccggtaatcatcacgcggcgtgggcagacgatggcggtacaactgctcccctgcatcgcccagtgcaatcacttcagttttggtgccgcctaaatcgatacctatacgcacggtactctccttatttttttcaatatcaatagcgtagagacggacaaccggattggcaatgcaaggccgccgacaattcgttatcatgcccgctaaatttaacgacaaggccgtggaaattatcatgctgtggttcaaaaatttaatggtttaccgtcttagccgcgagatttcgctgcgtgcagaagagatggaaaaacagctagcctcgatggcatttaccccatgcggcagccaggacatggcgaagatgggctgggttcctcgatgggatcgcacagcgatgcgttaacgcacgttncaatggcaaattgtatctggcgccaaagaagaaaaatctccgtttcggtgataaac

SEQ ID NO: 1790 - DNA, 549 bp, Ctenocephalides felis
gcgagaccaatgtcaccggcttaacaatctatcaaatttgccgggccgtcgactggacaattgtttcacaaatgatgttattttgtccaacaataaataatagtcccagtgttttaaaacgtcagcgatacgctgcaaagtgtacaagtgtcatatatgttctgtagtcgtgtctgcatatcgatccgttttgccattgccttgaaaacgccatattgtatgtactttacgtagttatatccaacttttgaattaaatgtgttttaagtgtttaatgttattttcctaaatcttgtatttgattagtaacccttaatcatggatagaaggaagctttccacttctggtgatactttataccaaatattagccattccaaaaactgccactcaagatgaagttaagaaaagttataggaaattggcgttgaagtaccatcctgataagacccaaataatccagaggcgtctgaaaaattaaagaagtaaccgacccatatgatactagcgatgcagcaaaagaacatatatgacaattatggtcttagga

SEQ ID NO: 1791 - DNA, 549 bp, Ctenocephalides felis
  misc_feature (16)..(16): n = unknown
aatcggcggtgcgccncaacgtattacctgggaaggttcgcagaaccaggatgcggatgtcagcagcgacggtaaatttatggtaatggtcagctccaatggtgggcagcagcacattgccaaacaagatctggcaacgggaggcgtacaagttctgtcgtccacgttcctggatgaaacgccaagtctggcacctaacggcactatggtaatctacagctcttctcaggggatgggatccgtgctgaatttggtttctacagatgggcgtttcaaagcgcgtcttccggcaactgatggacaggtcaaattccctgcctggtcgccgtatctgtgataataattaattgaatagtaaaggaatcattgaaatgcaactgaacaaagtgctgaaagggctgatgattgctctgctgttatggcaattgcggcatgttcttcaacaagaacgccagcaatgacggcagctgctggaaaaagtcgagctgcggaggataacccagcagactggaggagtttcgaaagatggaaggatccagtcccaattcc

SEQ ID NO: 1792 - DNA, 248 bp, Ctenocephalides felis
  misc_feature (214)..(215): n = unknown
cagagacttcatatgctttgatggtaataactttctgagtcctgatgcatttgataacgaaaaaattaaagaacgaaaattaacttacaaggcaaggaaaaacgatagagaaactatgtgtcccaaaatataggaaaaacaagaattatcaaaataatctaaatatatttacaatgtaataaaatattatatataaaaataaaaaaacgtcatnnttcaaaaaaaaaaaaaaaaaaaaaaaaaaaaac

SEQ ID NO: 1793 - DNA, 549 bp, Ctenocephalides felis
  misc_feature (17)..(17): n = unknown
  misc_feature (506)..(506): n = unknown
aatccacaattgttacncgtaacaaatcgaatcattgaacgttcgcgcgagactcgctctgcttatctcgcccggatagaacaagcgaaaacttcgaccgttcatcgttcgcagttggcatgcggtaacctggcacacggtttcgctgcctgccagccagaagacaaagcctctttgaaaagcatgttgcgtaacaatatcgccatcatcacctcctataacgacatgctctccgcgcaccagccttatgaacactatccagaaatcattcgtaaagccctgcatgaagcgaatgcggttggtcaggttgcgggcggtgttccggcgatgtgtgatggtgtcacccaggggcaggatggaatggaattgtcgctgctaagccgcgaagtgatagcgatgtctgcggcggtggggctgtcccataacatgtttgatggtgctctgttcctcggtgtgtgcgacaagattgtccggtctgacgatggcagcctgtcgttggtcatttnctgcggtgttgtccgctggacgatggcagcggttgcaaataaa

SEQ ID NO: 1794 - DNA, 446 bp, Ctenocephalides felis
  misc_feature (446)..(446): n = unknown
aatggctccagcgcttcgaaaagtttatgatcaaatgcctgaaccacgttgggtaatctctatgggtagttgtgctaatggaggaggttattaccattattcatattctgtagtgaggggttgtgatagaatagtaccagttgacatatatgtaccaggatgtcctccaactgcagaagctttgttatatggttgtttacagcttcaaaagaaagttaaacgaatgaaaaccctgcaaatgtggtatagaaaataaattattgaaaaggagaatattaattataaaaaatatgctatatcaaaagtgtagaattatgtttacagtaatgtaaacaaattttattttttcttcactaattattgaaaataatatgttcataatcctatagcagaatttaataaataaaaacacattttaaaaatgaaaaaaaaaaaaaaaaaaaaan

SEQ ID NO: 1795 - DNA, 549 bp, Ctenocephalides felis
  misc_feature (533)..(533): n = unknown
attcatttcaatattgggtgaaatcagtatgaattcattattaagttcaatcattattgtggtattttcggtatggttaagtgtaatttttgcagttaacgtaaagcccaaaccaaatcaagatgattactgtaatctaaattgtacaaatggaccaaatgtaggatgcacaaaaccggatgtacctagagactgccaaaactttaaacttgtgaatataacagaacgtatgaaaaaggcatttttaaatgcacacaatagaaagagaagacttgttgcagccggaaaaggtcttctgaaagatggtgtacacactccaattgctgcaaagatgcccaacttaacgtggaatatagcgctcgccaagttagcagaatataacgtgaagcaatgcgaaatgaagcacgattgtgctaaaactagacatggtcacactggtcaaaacctattttttatggcactactctcagcccataaaaaactcaactatagcaaaatggcagttgatggttggatgtgaagcaaagatacangattggagatataaga

SEQ ID NO: 1796 - DNA, 549 bp, Ctenocephalides felis
  misc_feature (16)..(16): n = unknown
aaatgtcattgcgttnctatttttgattatttcatcagtatttcaataaatccaacatatgtctcggcacacatcattataattaaattattagtatcatttccattaatttattttactggcgtcaatatgacggtatcaaacgacgaattagttgaatcttttaaagctttaggtttaagtgaacaaaaggcgaaagaaacgttaaaaaatacagttgttacgaaaaatttaacattagcattacatgaggtgaggggcattattttgccccaaggagctggttctttaatctattatgtggcaacaaaaatcaaaccacagattatagatcaattgcctgtacttgtaaaatatatatcaacatcaaaattagacacaacagttagagttgatgcggccttgcaatttatgttgtctcatttaaatggatatcaaatcgatgaatttgagaaggcttgtggaattgggttgtgtacacctgaacaaattgaaaaagcagaaatgaggcttgtggaacataaagaggcaattttgagaacgatacag

SEQ ID NO: 1797 - DNA, 549 bp, Ctenocephalides felis
  misc_feature (2)..(2): n = unknown
  misc_feature (525)..(525): n = unknown
antccatataatcggttcgcgaactggttcgaacacatatctgtgtacacgtgttagtatcaaattaattattaaaagatataacgatcgaatcatataagatattttgtgattatccgcgagagaaagaataaccgcttcgctgacgtagttttggttatcagttcatttgattcggacgttccggcaacttgttagtaaacatgagtttctgtgagaacaataactacacggtggatgaatgttcctatgaaaggattaaagagacgacagaatttctaattcagaaaaccaaatatcgaccaaaaattggtattatctgtggatccggaataggacccctggctgacaatttacaaaatgcagattccttcgattacagtcaaattcccaactttcccgtaagcacagttccgggtcataaaggtcgacttgtatttggcaccttgggtggaatcgaggtcctttgcatgcaaggacgttttcattattatgaaggctattcgtgaatagtgtgtttcggtngagtatgaaatactggcataccat

SEQ ID NO: 1798 - DNA, 549 bp, Ctenocephalides felis
  misc_feature (537)..(537): n = unknown
aattttattttgcattactaccttatataacgaaaacacaaatgtaaaactcatcccacagatgaattacctgatggttgttgtggctttgtttttccttaacgccgtcatttttcttttcatgttaatgaaatatttcactaacaaacaaattttaccaacactcattttaagccttgcatttttaagtggccttatctatttagttgaaaccattgtaattatccataaaccaattaacggcagtacactgatccagacaaagtcgaatgatgtttctattttctatattttccgccaactcagttttatttgtttaacctcgctggcgctcttttgttatggaaaagacaacatccttgacaacaataagaaaaaaacgggaatcctgttgctggcgctgatcccttttttagtttttccccttctggcacacaatctgagcagttataacgctgactattctttgtatgtcgcgatactgtcggacaaccatactgcgacctggggaataacttcaaaatattggtttgctgnggcttttactgt

SEQ ID NO: 1799 - DNA, 549 bp, Ctenocephalides felis
  misc_feature (503)..(503): n = unknown
  misc_feature (523)..(523): n = unknown
  misc_feature (541)..(541): n = unknown
  misc_feature (543)..(543): n = unknown
gtaacaaacatgacgaaaaaggtgtcaccaatttgagcatagcagcaccacctcaaccattttctgcatctcaaccttcaccatcggtcatcacacgtatgctgcataatccaggtggaaatcctccagtgtctattaatccaactgctccagtcacttgtgattccaatatgcctactggatctgtgggattgaccacctccccttccagctttcaaggaaaatattacccgcattctgaaaattatttacaaaggcctaggggaccaatgggagcagctatgggaatttatagacctgcaggccctatgggtaattatccaccacgtggtatgtatcattctcctcatcatccattagacccctcaccttctggtggaggacctatcaatgtgcagcaaatattctcccgacgtcagcgcctggacaaattggagctcaccacctttgagactgtactcccccaaagcgcgtatgccctatgaatcatgcatccagcatanggcccagcattctaattttnaaatcacttatggctatnanggcacc

SEQ ID NO: 1800 - DNA, 549 bp, Ctenocephalides felis
  misc_feature (4)..(4): n = unknown
  misc_feature (191)..(191): n = unknown
  misc_feature (541)..(541): n = unknown
aatnaatggactgcgttatgaaaggactcaataaaatcacctgctgcttgctggcagcactactcatgccttgtgcaggacacgctgagaacgaacaatacggcgcgaacttcaataacgccgatatccgccagttcgtggaaatagtgggtcagcatcttggcaaaacgatcctgatcgacccttcggtncagggaaccatttccgtacgcagtaatgatacgtttagccaacaggagtactaccagttctttttaagtattcttgatctttacggttattccgtgatcacgctggacaatggttttctgaaagtggttcgctcagctaatgtaaaaacatcgccagggatgattgctgacagttctcgtccaggcgtaggtgatgagttggtcacccgaattgtaccgcttgagaacgttcctgctcgtgacctgcccccctgctccgcagatgatggatgcgggtagcgtcgtaatgttgtgcattatgaaccctccacgtcttattctgccggcgtgcctcaccattaataaactgnttgagcat

SEQ ID NO: 1801 - DNA, 549 bp, Ctenocephalides felis
  misc_feature (4)..(4): n = unknown
  misc_feature (164)..(164): n = unknown
  misc_feature (345)..(345): n = unknown
  misc_feature (456)..(456): n = unknown
  misc_feature (534)..(534): n = unknown
  misc_feature (541)..(541): n = unknown
gctnagcttttcaatatactttaagctaaaacagacgttgtaatgaatggagaaatgtgaaggatgaattacattctaataaaaatgattttaaaatatcatgctacgcatatcatctattatatgtatgtgattaatgccgaaatctgcacagcaaaacaaanaccaaaacatttatgtaaactagaatcaatatttgcttgtgtaattgcatatttattttgatagcccaatatagagtagatcgacttcgaaattacgaattacatacacacatgtatatatatatatatatatatatatatatatatatataatatgcataaatatacataaatatatgcntgtatatacacatgtataaatatagaattttacatatgtgtatatgagcatatatatatatatatattcttatttaacctcatatttataattaattatatggtaatcgcnaaaaaaaatgataacacaatgttttgtaaatcataaatcacatacgtactaaatatttagtatctggttttcatacanccctagncgtattat

SEQ ID NO: 1802 - DNA, 549 bp, Ctenocephalides felis
  misc_feature (548)..(548): n = unknown
gctaacagttacaattaatttttaagtattgggcgttttattattgtattttaatatataattctatatttaaatcaattatgagtttgcctttagaaattagaagacttgacgaagcagtaattaacagaattgctgcaggagaaatcatccaaaggcctgcaaatgccttaaaagaattacttgaaaacagtctcgatgcaaaatccagtagtattcaaatttcagttaaatccggaggcttaaagtacttacaaatccaagacaatgggacaggaattcgcaaagaagatttggccatcgtttgtgagcgatttactacgtctaagctccaaaaatttgaagatttacaaagtatagccacctatggattcagaggtgaggccttagctagtataagccatatagcaagactttccatacaaacaaaaacagcagactccgttgtgctttcaaagcatcttacgaagatggaaattgaaatttccccaaccatgtgctggaaataaggacccaatacagtagaagacttttctatatactacagnt

SEQ ID NO: 1803 - DNA, 549 bp, Ctenocephalides felis
gatctaaatcccagcttaataccggcatccacgcatagatgtttacacctgagcgggtacgtaattgccaggcaacccgactaaaaatatctgctttcattggtagcaaacgatttggaaaccagacctctttgaccagcccatcaccatcgggatcagcaaatgcctgcaaatacacggttgatatttgcatatctttcacccgctgaattagcacatcaatattgcgatccatttgctggaggttttcgtcataaacgtaatcaagatcgatatgcattatccgttgtggtgatttttcctgtacggtaataatttgctgggcaaactcttttaatgagggattattggcgattaatacccgcggaatggaatccaattgcgacgcatttgccaaacctgattcaagggtgagcccggtacccaattcgcctatagtgagtcgtattacaattcactggcgtcgtttacaacgtcgtgactgggaaaaccctgcgtacccaacttaatcgcttgagcacatcccctttcgcagctggcgtatacgaa

SEQ ID NO: 1804 - DNA, 280 bp, Ctenocephalides felis
  misc_feature (15)..(16): n = unknown
aattctgcgatctgnnaggtgtgcgtaattgtcgcgatctgactgattttggcagagaaattcgcgcaacggtgctacaacgtacccatcttactgttggtgtggggatcgcccagaccaaaacgctggctaagcttgccaatcatgcggcaaaaaaatggcagcggcagacgggtggggtggtggatttatcaaatctggaacgccagcgtaaattaatgtctgctctccccgtggatgacgtctgggggattggacggcggatcagcaaaaaactgga

SEQ ID NO: 1805 - DNA, 528 bp, Ctenocephalides felis
gcgcccctatgagtgcagtatatgcaagaagacattcacacaatcgcgggctctgaaatctcacatgctcattcacaatggtgagcgcccccttgagtgcaatgtatgcaagaagacattcacacattttgttgttctgaaaagacacatgctcgttcacagtgattagcgtccccatgaatgcagtatatgcaataagacattcaaaggattaagttctctgaaagaacacttgcggattcatacaggagagcgtccttataaatgtgaaatatgcaataaggaatttactctattaagagttttgaagaaacacatggccattcatagtaggaagcgtgatgaaaatcagtgaaatatctgttaaattgtatttaaatatttggaaacatgttataaaatattcttacatataatagaatgtataattagataaaatatattttataaatatgtaataataaacattaaacatgcattattgtaaataaaggcaattgttcatattaaaaaaaaaaaaaaaaaaaa

SEQ ID NO: 1806 - DNA, 549 bp, Ctenocephalides felis
  misc_feature (494)..(494): n = unknown
  misc_feature (543)..(543): n = unknown
  misc_feature (549)..(549): n = unknown
aataaccttattgctctactaaaaatatatataataatctctgattttgggacagaaataatttaaatattttagatagctttcaataaagaataactaatatagtatccaattaattagtctcctgtcagcatgtctacacgatggtaccctctttatcaaagaggcaatccacagctgagagtattcttaccaaatttctggttgaaattaataaggcctgttcatgaacaaccaccaaatgttgtgcaattcgcctgttccatgcaaatgacaaaatacgatataaaaaactatttagaaaaaatatacaatgttccaatcatagatgtgagaacaagaattcaattaggtaaaactaaacgagatttgaaaggatatattgtaaaagaagaagatactaaattagcttatgttacattgctaaagaagaagtattgaatttctaatatttcaaaaaagatgaagagagcagttcaagaagattgaaaagntgaatgaatcaaagaacttataaaatacctggaagaataaaatcaccgncaccan

SEQ ID NO: 1807 - DNA, 549 bp, Ctenocephalides felis
  misc_feature (17)..(17): n = unknown
  misc_feature (135)..(135): n = unknown
  misc_feature (149)..(149): n = unknown
  misc_feature (305)..(305): n = unknown
  misc_feature (374)..(375): n = unknown
  misc_feature (447)..(447): n = unknown
  misc_feature (463)..(464): n = unknown
  misc_feature (473)..(473): n = unknown
  misc_feature (480)..(480): n = unknown
  misc_feature (495)..(495): n = unknown
  misc_feature (518)..(518): n = unknown
  misc_feature (521)..(522): n = unknown
  misc_feature (544)..(544): n = unknown
aattatgatgttgattnccatgaagatgctgataaagccaatcaggcactgaaagatgcggtagcggaattaatggaaaacgaagaaattcgcgggctgattattggtgaaccgaattttgccgggattgtcggnttaagcaataccgngtttacactgcgtgtttcgttcaccacgctgccactcaaacagtggacggtacgctttgccctcgacagccaggtgaaaaaacatttcgacctggcgggcgttcgcgcgccagtgcagacttatcaggtgctgtctgctccgggcgcgaccccggntgaaccgttaccgccgggggaaccaacgctttaacgctggcgattgacaaaaacgggcggcgctgtcgnngttcataaaggtcaaggcaataaagcactttgctttgccctgggcctctctttttacaccttcaccgcccancgtccgtaaggcacgnncaccggggntagtttnacaacgagatccagnatgtaaaccctaacctgcttcgnganncttggtttctcatattttttgnaaaag

SEQ ID NO: 1808 - DNA, 549 bp, Ctenocephalides felis
aatcaattaaatcacttaaacctgcgagtcatttcgtaattacattaattaaaaaacttaaaatcattaaataaataaaaaaccactaactctatgtgaaataaatcaaaatttcacgccgaaatactccttaggatgtatagcgaaaggagaaaaagatatacctcgatcaccccctttctcccaagtgaaaataaaaggttatcagtttgcaacattgaacaacattcgttgcaaatcgataacaacatgcaccttcaggatactatttattatgttcggcaatgatattttcacccgcgtaaaacgttcagaaaataaaaaaatggcggaaatcgcccaattcctgcatgaaaatgatttgagcgttgacaccacagtcgaagtatttattaccgtaacccgcgatgaaaagcttatcgcgtgcggtggaattgcggaaatattattaaatgcgttgctatcagtgaatccgccgcggtgaaggactggcgctgcattagccactgaattgataaacctcgctatgacggcacagcacgcttgtta

SEQ ID NO: 1809 - DNA, 549 bp, Ctenocephalides felis
ttgaaagcaaaatattattttggcactgactaaccctgacttttgctatgtcaattacctcagcagataaaaataattcataggaaagtgtaatttataacaaacgtcgcaatatatatttcacattttcaagatggaacaaaataattcagttgactggcaaatatcaagaaaagaagtaagacagagggctcaatatcttttagaaacagggcaatggtcagattgcaaatttttagttggttcagaatctaatcaacaagttgtggaggctcataaattatttttggctattgcctctccagtattcgaagctatgttttttggaaatatggctgagaaaaatgatacaattccaatattggatgtacagccagatgctttcaaggcattgttagaatatatctacacagacaacattaatataaactcttttgcaaagcttgtgaactgtgttattgtgcaaaaaagttatgttacccatttggtagagaaatgtcaaaattttatggctgactcatgctcgaaatgtgtaagcatatgaatttg

SEQ ID NO: 1810 - DNA, 549 bp, Ctenocephalides felis
  misc_feature (27)..(27): n = unknown
  misc_feature (118)..(118): n = unknown
  misc_feature (434)..(434): n = unknown
gtttgaagaaaaaggaaatattgccgngcgagcagggcaggaagatcgaggcaaaggtcacggacgagctgataaggaggcttataaacgcggataaaattaaggaggcgaatgcggncagacccaaggcagaaagggccaagaaggaagcggctgcagcgaaggaaggggatgaatttgatcaaatggttgacggttccaagaagccactgaagcaacgaatcaaaaaggaagataaagataaagacaaggataaaatgaaacagactaaattagattttagtaaaaagggaaagaagaacaaaaagaaaggcgccagaaaggattcttttggcagcgaatcatcggatgaagatgatccggattcagattttgaagctcatgcatcttcagaatctcctaaaagacaattagcaagtcggggaactaaaaanccggtgaaatacagtctgcggagttcagatgaagaagaagagctgtttgacaataaacaaatggacagtgagccgtgtgtgtaccgtcttcagatctgattccgtgtgaacctct

SEQ ID NO: 1811 - DNA, 549 bp, Ctenocephalides felis
aatgaaatcagtctttatgccggttatcaggcaggaatatggtcaacatccccaatagtggcaggaaagcacagattttatagactaactcgatgctggtgtgatcggcgataagccccagaactgccgctcccagacctcccatgccaaaagcaaaaccgaaaaagagtccagaaaccataccgatacgtcctggaagcagctcctgagcgtagaccagaatggcagagaatgccgaagcgaggataaatccaataatcaccgttaaaacccccgtccagtgcaggctggcgtagggtaaaatcagcgtaaacggcgcaacgccgaggatagagccccaaatcacatatttccgcccaattttatcccctacaggcccgccgatcaccgtacctgccgcacggcaaacaggaaggcaaacagatgaagctgagcattctggatagataatccgaatttttgcatcagataaaaggtgtaatagctgtgtgctcgcatatagaaatatttcgagaaaatgaggattaacagatgctgccgcagtacaac

SEQ ID NO: 1812 - DNA, 549 bp, Ctenocephalides felis
  misc_feature (16)..(16): n = unknown
atggctctcgcctctntatgccgacaagctcgctctctttctgtctatcagaacaaattcgctactcgtacgacgcgtcagtcttcgattgttcttgattcagttcgcgaattttcaaagaaaatgggtctgccacgagttttcttcgacatgaccgccgacggcgagccggttggaagaatcgttatggagcttcgtaacgatgtgacccccaagacctgtgagaacttccgcgccctctgcaccggcgaaaagggcttcggctacaaaggctcctcattccaccgagtcatccccaacttcatgtgccaagggggcgacttcacaaaccacaacggcaccggcggaaagtccatctacggaaacaaattccccgatgagaacttcaccttgaaacacaccggcccaggcatcatgtccatggcaacgcaggccccaacaccaacggatcccagttcttcatacgactgtcaagacacctggtggacaaccgcacgttgtctttggatcggttgagaaggatggatgtcgtgaagaagtggagagtat

SEQ ID NO: 1813 - DNA, 549 bp, Ctenocephalides felis
  misc_feature (19)..(19): n = unknown
  misc_feature (343)..(343): n = unknown
  misc_feature (355)..(355): n = unknown
  misc_feature (403)..(403): n = unknown
  misc_feature (427)..(427): n = unknown
  misc_feature (468)..(468): n = unknown
  misc_feature (480)..(480): n = unknown
  misc_feature (504)..(504): n = unknown
  misc_feature (508)..(508): n = unknown
  misc_feature (519)..(519): n = unknown
  misc_feature (529)..(529): n = unknown
aatacgctttccacggttngcaaccatttaaatcggtaagtaaaacatcaacatattgcgtattcgggtagcgctccaggtagcgtttcacttcctgcgtaaaggcgctaccccgcctctcttctgactgctgaacaaagttctctacttcaacgatattggtttccatgattcttcgcctttggtttgtttttccgctcgttatcaaagcgtaaaatataatgaccaccattcgaatctgtatgcaaactaaatgtttgtcaaatgttaaattgagtttgcaaaaatgaaaacccactgctagattgaaaaaatattgaacataaaggtcatttaaagcgcngtaatggcgatnatttagtccactttgtgagattgagcatggaaaatataatgaacaatncggttatcgggtcgtaatgtgcangaacaggcttaagggtcatgcgacccagactctgaagaaangtacctgatgcntctccatgcaggcggttgctattngctncacatgcgctngcggaccgtnatacttgacaactttgccga

SEQ ID NO: 1814 - DNA, 549 bp, Ctenocephalides felis
  misc_feature (505)..(505): n = unknown
  misc_feature (539)..(539): n = unknown
ggcgcgcagtgacactgcgctggatcgtctgatgcagggggcaccggcaccgctggctgcaggtaacacggcactggtcggcgtgcaggtggactcggagcagttcggcagccagcaggtgagccgtaattatcatctgcgcgggcgtattctgcaggtgccgtcgaactataacccgcagacgcggcaatacagcggtatctgggtagatcgggtttcgccggatgatggcggaagttgtcatctctggcttggacggggcgtaccgcctgccgttaaccgtcgccgctgaaagggggatgtatggccataaaaggtcttgagcaggccgttgaaaacctcagccgtatcagcaaaacggcggtgcctggtgccgccgcaatggccattaaccgcgttgcttcatccgcgatatcgcagtcggcgtcacaggttgccgtgagacaaaggtacccggaaactgtaaaggaaaggccaggctgaaaaggccacggtcaaaaatcgnaggccagaataaagttaaccggggggatttgccnataactggta

SEQ ID NO: 1815 - DNA, 549 bp, Ctenocephalides felis
aattctgcgcggctttgattttgacggccaggaggcgctgaaagattctcgcgtgctgatagtgggcctgggcggcctcggctgtgcagcctcgcagtatctggcaagcgccggtgtcggtaacctgacgctgctcgacttcgacacggtttcgctctcgaatctgcaacgccagacactgcacagtgatgccacggtcgggcaaccgaaggtggaatccgcccgtgacgccctgacgcggatcaacccacatatcgcgattacgccagtcaatgcactgctggatgacgcagaacttgcagcattgattgctgaacacgatctggtgctcgactgtacggataacgttgcggtacgtaatcaactgaacgcaggctgttttgccgcgaaggtaccgctggtttccggcgcggcaattcgtatggaaggtcaaatcaccgtctttacttatcaggacggtgaaccgtgctatcgtgcttaccgttgttggtgaaaatgattaacctgcgtggaagcagcgtaatgcaccgtgatcgggtattggtcgtg

SEQ ID NO: 1816 - DNA, 549 bp, Ctenocephalides felis
atcaattcgtattagactttttgataaaaaatgctgtctaaagcttcgcttttggccaaggtatcccggccactgactgtggcagtgcgaacaacatcccaggctgcaacatgccctgctcctacaaaggtagaagaagccgatagtgctgaaagagatttggtcaacttcccaaggccaacacgtttggaacattcacctaaagttcgctttggattcattccagactcatggtttgaatttttctatgagaagaccggtgttactggaccttacatgtttggaactggtttaattacttacttatgttcaaaggaaatttacgttatggagcatgaattctatactggtatttcattgggtattatctgtctctatgccactaaaaagttgggtccacatattgcaaaatacttggacaaagaagttgatgcctatgccgatgaatggaattcaggtcgtgtagaagaagttaaaagttccaagatgccattgaaggagaaaagttggacaatggagagctgaagtacttatgttgatggatgcaaa

SEQ ID NO: 1817 - DNA, 87 bp, Ctenocephalides felis
aatttccagcgcgctcagtaccaccacgtcgagacgatcaaccgatgcgcctttcgaaccccagttagcgtactggttggcgctgat

SEQ ID NO: 1818 - DNA, 549 bp, Ctenocephalides felis
  misc_feature (518)..(518): n = unknown
  misc_feature (525)..(525): n = unknown
  misc_feature (539)..(539): n = unknown
  misc_feature (541)..(541): n = unknown
aaaaaacaaacgcagtttgctaccatttgcggtaaaaagttaattacaaacactacaaaaatgaaagcgttcatcgtagcagctttactgatcgccatggtggcagctcgtccccagaaagaagtggagatcctgcgttacgacagcgataacattggcgtcgacggttacaaattcgcctacgagctgagcgacggaaccaaccgccaagaagaagctcaattgcagaacgccggaaccgaaaacgaggcaatctccgtccgcggctcttacacctgggtggcacctgatggacagcaatacaccgtcaactttgtcgccgacgaaaacggttttcgaccagaaggagcacacattccgaaataaaaccaccaaattaaattagactactatgtatgatactcaaatgatacctgcattgaatatgtcatgtatgccaatatattaactgaattgataacttaatagatcaaaagcaatatatatatatatatatatatatatatatatatatcgcncaatgtntgtatcattataananttttatca

SEQ ID NO: 1819 - DNA, 549 bp, Ctenocephalides felis
  misc_feature (477)..(477): n = unknown
aataccattttcaaaatcaccatattgcttcaaaaaatcgggatgtgtttccccaaaatcctctatatcttcccagccttctgcaccagaaataacggcacaaatagtcaacagtagaatatccgataatttatgttccactttccaggcttgtctgtaatcggggataatagaaatatgttccatcaattttttaagttccattttgttctccttaattatgtaagaagtatttgatcatgtataagcaataaaaaacagcttcaggtaataaggaatatctcaatttttaaacataaaatgcgaattatttagtacaaaaagcagggaaagattacgaaagcccgctccccgcaaggactgacgcgagggggggcccggtcccaattcgcctatagtgagtcgtattacaattcactggcgtcgtttacaacgtcgtgactgggaaaaccctgcgttacccaacttaatcgcttnagcacatcccctttcgcagctggcgtaatagcgaagaggccgaccgtcgccttccacagttgccagctgatg

SEQ ID NO: 1820 - DNA, 549 bp, Ctenocephalides felis
  misc_feature (4)..(5): n = unknown
agtnnatctataaagtgacatatcaataaatatttatttagcactaagtgtttttgtttataaaatcttaaaaacaacaaccatggctcgttttatgattgctttatccctggcggttttaatcgtcgccgtaaccgccactccctacggtgccggaggacacggaagcagtggcggcggacacggctccgggcttgactccggttttggggggcacggaagccgcggcagtggacttggaggcagtagtttttccagtggtagccacggtggcggacttggaggtggaagcagaggccatggaggcctaggcggatctggaggttttggaggccaaggaggccttggtggtggacacggaggcgttggaggcggacatggaggtcacagtggcggaggacgtggaggacatggcggcagtcattctagatgaaatataaaagagaactctctgaaaatttgttggaatctgtgattccgtctttatccaccagaaattaattaaaaatttgaattaacaatgaataatatgtatttttgataatttga

SEQ ID NO: 1821 - DNA, 549 bp, Ctenocephalides felis
  misc_feature (18)..(18): n = unknown
cccatggtatggagggantgggacctgaacattcttctggacgtttggaaagatttcttcagctctcttcagatgatcccgattatttccctccagaatgcgaagaatttgctgttcgacaattgcatgatatcaactggattgtagccaactgcacaacacctgctaattattttcatattttacgtagacaaattgctttacctttccgtaagccattgatcattatgactccaaaatcgttgttgagacatccagaagctaagagttcttttgatcaaatgacagagaacactgaatttatcagaatgattccagaagaaggaccagcagcatcagatcccagctctgtcaagaagttaattttctgctctggtaaaatctactacgacttgaccaatgcgcgccgtgaaaagaaattggataattctattgcaattgctagagtagagcaaatttctcctttcccatatgatttgataaagaaagaatgtgcgaaatatctaatgcaaatcttgatggctcaagaagagcaaaagacatgggtgc

SEQ ID NO: 1822 - DNA, 549 bp, Ctenocephalides felis
gctatcttgcggacaacaccgttgcgagagcaactgtcacaagggacgttgtgacccatgctggcgttcaagttttgatgagctgacatgtgaatgtggctacagcataaggtatccacccattccatgtggcgcccgcaaaccaacttgtgatcaagtttgctcaagacaacactcatgtagtcatcccgttcttcatacatgtcatagtgaagccgaatgtccaccatgtaccgttctatgttccaagtggtgttttggtaaacatgagatgcgcaaaactatcccctgccaccaaaaggatttttcatgcggccgtccatgcggaaaagaattaccatgtggtaagcattcatgtctattgccctgtcacaaaggtgcatgtctacaagacgggaagacctgtagtcaaccatgtgctacgcctcgttcttcttgcaatcatccttgtcgtacccttgcatgaaggtatttgccagacacaccttgaaagaaaaggattggtcatgtaatgtaaactcgtcccaccagacatgtcagaaacgtcgc

SEQ ID NO: 1823 - DNA, 549 bp, Ctenocephalides felis
  misc_feature (17)..(17): n = unknown
  misc_feature (521)..(521): n = unknown
  misc_feature (536)..(536): n = unknown
  misc_feature (549)..(549): n = unknown
aaaacccgacgaactgnaaaaaccgccgcgccagatatcctcttcgcgtaccacttgtttcagtcggccatattccgcaaaggcgacctcacgaatatccgccttgccaggctcatcttcaccgccaataaaaccaatacgattaacgccctggttgatatagaagtcgatgatttctttactgatgcgtgccagatcgatatccaccgcatcgtaaccgctgccgggttcgtgaaagtcgataaaacagatattgtcggtcaacgcgctggcagcggcgcgcagggcgggcgtgggtttgccgacaattaaaataccggtgacgtttttaatgtctggtaagccgctgtgttcataacagttggtgagctcgatgcccagcttttcgcactgggtttcaatgccgtggcggatcgcagatagtaaggatcgtgatctccagctcctgtggagctgtagatagccagaatatgggttggtgactgacctgttggagttacggcactactggcttgactcanttttcgggatctcgnaatgcgatgttcn

SEQ ID NO: 1824 - DNA, 549 bp, Ctenocephalides felis
gtcgaactacacgttttggcgacagatttttcgtacattgtcaataattaatattttaacaaaagcgaatacagtgaacggtcagtgatttttatgttatccgttaacgtaattcacttgtgatacaaagcaataggccgtcaaaacaaccgtgcgggtataatggcagcactccctcggcgtataataaaagaaacacttcgactaattcaggagccagtgccgggaatcagtgctattccggatgacagtaatgcacgctattttcatgtcgtcgtagccgggcccgaggactctccattcgaggggggctcatttaaactagaattatttttacccgaagactaccccatgtctgcgcccaaggtcagatttatcacgaaaatatatcatccaaatattgacagactaggtcgtatctgtttggacatactgaaagataaatggagccccgctcttaaatcagaacggtactcttatcaatacaagccttactgagcgccctaatccagatgatcctttggcaatgatgtggtgatgtggaagtaa

SEQ ID NO: 1825 - DNA, 549 bp, Ctenocephalides felis
aattcggtaattaattcttaacatgcttttactaataatctcaattgctggccctataatattgcgctagcattgctttctggttgtatcagcgatactcaaaaattcttaatacaatactcattcgactggtacttatttgtaactcagttatattttttcgcccggtgattcagaagaatgcaaaaaacggctaccactccatcaaaaatacttgatctcactgccgcggcatttttacttgtcgcctttctgacgggtattgcgggcgctcttcagactcctaccctaagtatattcctcgcagatgaactgaaagcccgtcctataatggtaggttttttcttcaccggtagcgctattatgggaattctggtcagtcaatttctggcaaggcactccgataaacaaggcgaccgtaaattactgattctgctatgttgcttatttggagtgctggctgccgctttttgcgtggaatcgcaactacttcattctcctctcaacgggcgtcttctgagtagtttgttcaccgaaacccgaaatgtc

SEQ ID NO: 1826 - DNA, 541 bp, Ctenocephalides felis
  misc_feature (5)..(5): n = unknown
aaggnggtttagtaatattagccaatatggcaaagtatttagggctagataaagtcgctcgcttatttaggattgtgtctgctaatggcggaattagaggaagtcttgcaaaactggcaagaacagatgatttaaaactgggcactctagtaggagaagacaaatacggtaataaatattatgaaaataatgaatacttctacggacgtaatagatgggtcgattatgctccacatgttggattaaattatgatgcctcccaagtgtgtcctgagtggtttggttggctccattacaaaacggatcttcctccaacaaaagatccagccagagcgcatcataaatggatgtcgaatcatagtgaaaacttatctggaacagatcgtcaatatgttccatattccactactgttcccaaaatcaggcatggaatcccaatgcaaaataagtcatgaaaattttggatttacttagtctaattgtaataatgtaattctatttaaaattatggacaagatcaagttaaaaaaaaaaaaaaaaa

SEQ ID NO: 1827 - DNA, 549 bp, Ctenocephalides felis
ggaagtcggactcggcacaaagaccgacttttgccgaagcccggcacgatctgaccgccctgcaccgtgcagagtctgccgccctggacgccatggacgatgcctcaacgacggactgttttgatgtcagtggattcagcgaggactacgaaaatggagttgtgtattttgataggcggatttcggaatttgaatgtgatatttgatttaggctcaaattgcacatcgggaaaatcaaattattatctagctttgtgcaattgggagggaacatcgatttgcagatactttcttgagcaaatatttttatatttatcaaatgcatagtatggaaaagtctctagatactttggtctagtacctggattatagcgaaattagccaaattttcaattatataaacagaaaattatttaggctcaaattgcacattggcattgaatttgccgaaattgattttctagcttcgtataattgtattagaagcattgatttttttttggaatacaaaaaggcgtcaagtgaaggaaaaattgatttggagatata

SEQ ID NO: 1828 - DNA, 549 bp, Ctenocephalides felis
cacaagacatgtcagctgagtcttagtccttcgtctgctgctaaaagtatattagaaaatcttgtatttttaatatttgtgtttgattttccagtcggttacgttatatacattatcacagaatcatggggcaagattcgggagtaaaggattttccttctttgcctgaagacaaaatagatatgattgctgctaccagcttattacaacaacatgctgcggatatccgtcagcaaaaaattaactggacatcatacttacagtctcaaatgatcactcaagacgactttaatttcataagtgcttatgactctactgattctaagggccgcataaggcttctcacagatcgcactcaagcagctaaaacatttttgaacatcctaacacatgtcagcaaagatcaaacaattcaatatgttttaattttgattgatgacatgctgcaggaggatagatccgtgtcgatattttccatgagtatgctgtaaaaccaagaaagtgatgggcccttcatgaattattgatcgcagacagttcattgtacat

SEQ ID NO: 1829 - DNA, 549 bp, Ctenocephalides felis
  misc_feature (532)..(532): n = unknown
ggcctcgttcgccgcctgcaatgccccggcttcatcgccggaacgctgcaactgagcaacatacgcaatctgctccgccgacacgttatggaactggcgagccatcgccgtcagccccgacgtcgggtctgtggtcagcttcccgaaggcttcagcgaccttgtccacctccacgccggatgcagaggagaaacgcgccacactctggctgatggacgcaatctgagcctcaccgcttacccccgccttaaccagtgcgctgagtgactcgctggtctggttaaacgtcagccctgccgcctgcccggctctggacaggaccagcatacgatctgccgtcagtcccgctgattgccggaaaggaccagcgttttgttgaaatcggacagggttgagttgcctgataccaggcatacgccagcgcaccggtcgcaccgcagcgaggtggccccacatcggcagggtgatcgaccggcaagccccctgaacatggggatatccgccgaaggagtcttacctgccccctgtgcanaggatagcacggatttg

SEQ ID NO: 1830 - DNA, 549 bp, Ctenocephalides felis
  misc_feature (403)..(403): n = unknown
aagtgtcagggcgtcttaaggatcatttggacttcttaattaatttccaaataatggctgatgcaaccgaaggaaacattgaaaaactatctaaaaatgagctcaaaaggaggttgaaagcagagcaaaaggcaaaagaaaaagctgaaaaggcagcagctgtaccagaaaagcctgtaaaagaagccaaaaaggaagtaacaaaagttgatgaagaaattagcccaaatgaatattttaaactccgaactgctgcagtaactgcattaaaaaattcaaatgatcctgatcagcatccttatcctcataaatttcatgttagcattggtttgactgagtttatagagaaatacaaggatcttcaggatgcgcaaatattggaagatgttactttgtcagttgncggaagagtgccgccatcagggagtctggagctaaacttgtattttatgattgaggggagaaggtgtcaaaattcaagttatggcaaatgcaaatattagttctgaggaaaaatccagaagacacatcgaaatccgcgtggtgtat

SEQ ID NO: 1831 - DNA, 549 bp, Ctenocephalides felis
  misc_feature (501)..(501): n = unknown
aatcgcggcggtgatcattgagccgattgtccagggcgcaggcgggatgcgcatgtaccatccggaatggttaaaacgaatccgcaaaatatgcgatcgcgaaggtatcttgctgattgccgacgagatcgccactggatttggtcgtaccgggaaactgtttgcctgtgaacatgcagaaatcgcgccggacattttgtgcctcggtaaagccttaaccggcggcacaatgaccctttccgccacactcaccacgcgcgaggttgcagaaaccatcagtaacggtgaagccggttgctttatgcatgggccaacttttatgggcaatccgctggcctgcgcggcagcaaacgccagcctggcgattctcgaatctggcgactggcagcaacaggtgggcccggtacccaattcgcctatagtgagtcgtattacaattcactggcgtcgttttacaacgtctgactgggaaaaccctgcgttacccaacttaatcgcttnacacatcccctttcgcagtggcgtatagcaaaggccgaccgatcgcct

SEQ ID NO: 1832 - DNA, 549 bp, Ctenocephalides felis
  misc_feature (533)..(533): n = unknown
aggacaacatcagagtttgaaattgtacgcagcattaaagaaaaagcctgctacttagctagtaatcctcaaaaggaagaaagtgtagacacagaaaaaattcaatatgttcttcctgatggttacccattagatattggtccagctagatttagagctccagaagttttattcagacctgatctaatcggtgaagaaagtgaaggcttgcatgaagttcttttatattctatcgaaaaagctgaacgagatttgaggaaagtattgtttcaaaacattgttttatcaggtggttctactctatttaaaggctttggtgacagactgttgtcagaaattcgaaaacaagtaccaaaagatatgaagattaagatttctgctccacaagagcgtttatattccacctggataggaggttccatttagcttcattagatacattaagaaaatgtgggtttctaagaaagagtatgatgaagatggcaaagagctgtcatagaaaacttctaataatagcattgcttctcactcantaatattaaggtattt

SEQ ID NO: 1833 - DNA, 549 bp, Ctenocephalides felis
  misc_feature (89)..(89): n = unknown
  misc_feature (106)..(106): n = unknown
tgccattccgccacggcgatattttacacgtgacgaacgccagcgacgacgaatggtggcaggctcgccgggtacctcctccaggaggngctgatgaaggtacggntggcatagttccttctcgcaaacgttgggagaggaaacagaaggccagagatcgcagcgtcaagttccagggacaacagcctggacaagttggggataagcaaagcacgctcgataggaagaagaaaaataactttgcattcagcagaaagtttccatttatgaagtctaaagatgataagagcgaggatggatctgatcaggaacgcgaagaaaacgttctttcttatgaagctgtgcaacaattgactataaattcaccagaccagtcataatattaggaccgctcaaggatcgcgtcaatgatgatttgatttccgaatttcccgaaaaattcggcagctgcgtcctcatactacaagaccgaagagaggtatgaagtggtggcgagatatcacttctggcatccgcgaacaaatggacgtgatatcaaatattgttatt

SEQ ID NO: 1834 - DNA, 549 bp, Ctenocephalides felis
  misc_feature (17)..(17): n = unknown
  misc_feature (489)..(489): n = unknown
aatttcgtgcagcagangtaaataaatctggcggagcctgggagctccgccagagccgttaaacagctggcatattgcgcccgtaataaatctcgcgcatttctttccacagcgcagcggtaatttcctggcgctcgctgtcggttaagtcttccggtttggtgtggaacatgtagtgcttaaggtcgaactctttaagcaacatcttggtatggaagatattttcctgatagacgttcacatccaccatgtcatacagcgccttcatatcgtcagacataaagttctgaatcgaattaatctcatggtcgataaagtgcttcataccgttaatgtcgcgggtaaaaccgcgcacgcgataatcaatggttacgatatcggactcaagctggtggatcaggtaattcagcgccttcagcggagaaatcacgccgcaggtagagacttaatatcgggcggaaggacataaaccgcttaggatgactttcnggtaggatgtcgcaaatatgactttataagatggcacgaccgtttgcagtggccgggtgt

SEQ ID NO: 1835 - DNA, 549 bp, Ctenocephalides felis
  misc_feature (542)..(542): n = unknown
  misc_feature (545)..(545): n = unknown
gtggcttcggctttgataacttcctcaagattattcattttgattgtggtaaaaaatgccttctttaaacttgagcgaaaatgatcgtgctgtgttaaatagtatatttaatccgtctcaaccattaggagaaaatgcattcgaggaagatattccagaattattagaagatcaagaagacccggaaacaccatttttgaacgacgcacgagccttggaagctgaagctgtccgtttggccgaagccggggatttggcagccgcgctgaccgtggtggaccgcgcgatagacctgctgcccggtcgtccttcaggttacaacaatcgcgcacaagttcacaggctggcgggacgagaccaagatgctttgtcggatttaactatggctgtgaacctcagctccggaaaaggaagatctggtgtgcaggctttatgtcaacgggcctctgtcagaaaaactggtgaagacgattagctcgggaagatttaacaaagcgaagcttagctcacttgcaaaaatcagtagtggaatgaatcttatntgnttat

SEQ ID NO: 1836 - DNA, 549 bp, Ctenocephalides felis
  misc_feature (18)..(18): n = unknown
ctttactccgagcaagtngtgggacgactcattattatttattttgtgataatcttttaaatctcctaaaatgaggatctacaaagacatcattactggtgatgagatgttctcagacacatataaaataaagttggtcgatgaagttttgtacgaagtgaccggcaaattggtttcaaggtctcaaggggatatccaaattgaaggtttcaacccatctgctgaagaggctgatgaaggaactgaaacagccacggaatctggtgttgatgtggtcttaaatcaccgcctttgtgaaacttttgccttctcagataaaaaatcatacactctttatttaaaagattatatgaaaaaattggtggcgaaattagaggagaaatcaccagaacaagttgaggtattcaaaacaaatatgaacaaagtcatgaaagaaatttaagccgtttaaagaaatgcaaatgttcactggtgaatcaatggttgtgatggcatggttgctcttatggaatatcgtgaaatagatggtgaatctgtcaattctgtgtc

SEQ ID NO: 1837 - DNA, 549 bp, Ctenocephalides felis
  misc_feature (489)..(489): n = unknown
gttcaaataattctttatgttttaaacaatcgttatagtttaatagatggtcagttataaatttagcgtttatctattgttatttgttactcgttagttagtattattttaagtaggattcagtgagtgatatttgtgaattactcgaaacacatacatatataaactcagaataatgggaactcgagatgacgaatacgattatttgttcaaagtggtgctaataggagactcgggtgtaggaaaaagtaatttgctttctcgcttcactagaaatgaatttaatcttgagagtaaatccacaattggagttgagtttgcaacgaggagtatacaggttgatggtaaaacaattaaggcgcaaatatgggatactgctggccaagaaaggtatagagctataacatccgctattatagaggagctgtggtgctctcttagtttatgacattgcaaagcacccaacttatgaaaatgtagaacgtggtncgagagctaagagatcatctgacagaattagtgtatgctgtgggaaacaaattgtctgaa

SEQ ID NO: 1838 - DNA, 549 bp, Ctenocephalides felis
  misc_feature (175)..(175): n = unknown
  misc_feature (503)..(503): n = unknown
attttttttgccgggtcgtagtaaccaatttaaggataatggctcctccaccatacgcagacttgggaaaacaagctagggaggtatttaacagtggctatcattttggtcttttcaaattgaatttgaaaactaaaactgcctctggggttgaattcacttcaggaggaacttntgaacatgaaactggcaaggtatttggatctttggagacaaaatacaaagtaagtgattacggtctcactttttctgaaaaatggaacacagacaatactttagctacagaagtttccatacaagatcaaatagctaaaggtttgaaagtatcattcgactgctctttcgcaccacaaacgggaagcaaaactggtgttttgaaaactgccttcttacatgatagtgttgcagtaaatgctgatgtaaatttgaatttatcaggacctttgatcaatgccagcgcagtagttggtatcaaggatggtggcggtataaactggatttgntctgaaattcaaggcacaaagacactttgccttggatctcacagga

SEQ ID NO: 1839 - DNA, 549 bp, Ctenocephalides felis
  misc_feature (18)..(18): n = unknown
  misc_feature (466)..(466): n = unknown
  misc_feature (545)..(545): n = unknown
  misc_feature (548)..(548): n = unknown
attaaaatattattgttntaattgaattttgagttggttttgagaagctagtgccatgtttgattcaaggattactgtcggtttgctgctgacaataagctgttacttagtgtcgtccctgccccaaagaggaggattccaacctcaggctccaggaaaccaaataccaattttacggtattcattcgaacctaatccagatggttcctacaattacaactatgaaactggaaatggaattcaagtagaagagcaaggttacttgaaaaatgctggaaatccacaaacagaagctcaggtgatgcaaggttcctactcctacacgggccccgacggagtcgtctacacggtgaaatacatagccgacgaaaacggtttccgggccgaaggcgcccacataccctcggcaggaggacccgcaaggcggcgcccggcggtagattttctaggaaggaaaacatctagncccaccacaacattttaattatgaaaaacacagcgccatgatgcgagtcgaggaacaatggactataataattaatctncgng

SEQ ID NO: 1840 - DNA, 549 bp, Ctenocephalides felis
gccaacttgtatgccacgtcgaaaacactaaaaacaaatcgaattaaataaaattataaaataaaacaaatataataacaaagtattaaaacgtgtgatatattatttatattattattattatcaaaagtgtgagaacgtacaacgctcttgttaattttccagacaggaatttttagtgttgccatatatataagcgcgaggaaagatttacatacaagatgggttgcggaatatcgttcgttaaatacgttctgttcgtgttcaatttaatatttgcgctatgcggtctcgcagtgctcgccgttggcgtggtcttcaaattgaagttctcagagatccagcaaatgctccaggacttaaacgtccaggccgcaccaatactcttcatcaccgttggaagcatagtcttcataatcgcttcttcgggtgctgcggagcgattagggaaagtcattgtatgacagtcacttcgcagtcttttaatcgtttgctgacgccaagtcgtgatcgcgctgtgtcttcgctatgcgtgcatcaacaagatct

SEQ ID NO: 1841 - DNA, 549 bp, Ctenocephalides felis
  misc_feature (544)..(544): n = unknown
  misc_feature (547)..(547): n = unknown
aattaaacgtgcactggaaggcggcataaatttctttgataccgccaacagttattctgacggcagcagcgaagagatcgtcggtcgcgcactgcgggatttcgcccgtcgtgaagacgtggtcgttgcgaccaaagtgttccatcgcgttggtgatttaccggaaggattatcccgtgcgcaaattttgcgctctatcgacgacagcctgcgacgtctcggcatggattatgtcgatatcctgcaaattcatcgctgggattacaacacgccgatcgaagagacgctggaagccctcaacgacgtggtaaaagccgggaaagcgcgttatatcggcgcgtcatcaatgcacgcttcgcagtttgctcaggcactggaactccaaaaacagcacggctgggcgcagtttgtcagtatgcaggatcactacaatctgatttatcgtgaagaagagcgcgagatgctccactgtgtatcaggaggcgtggcggtattcatggacccgctgcaagggccgttgaccgtcgtgggagaactccgacgntgngt

SEQ ID NO: 1842 - DNA, 549 bp, Ctenocephalides felis
  misc_feature (17)..(17): n = unknown
  misc_feature (46)..(46): n = unknown
  misc_feature (493)..(493): n = unknown
  misc_feature (497)..(497): n = unknown
aatatcgccctgaaccntcgaaacctgaatggttttctccggttgnggggtaaaccactggatgtaacgcagcgggaagggaagggcaaacagcacgacggccaccaccagcggacgccagttgcgtttgaccaacgccagtgccagcaggccactaaccatcatcagcaggaagttaatggcttccacgcccattatcggtgccagcccttttaacgggccatcaatctggctatagccgaactgtaaccacgggaagccggtcagtacccaaccgcgcagaaactcggtcacttgccagagggcaggggcggcaatcgctacgcgcagccaggtggttttcggccacagacgcgacagcacgccagcaaacagtccggtatacagcgacaaatacgccgcagcagcaccaccaggaagatgttaaccgggccaggcattccgcaaaggtcgcgatgctgacatagacccagttatccgctgcaaagaggcnaatnccagcaaaagccaatagcggcagatggagtgacggcggtaaaggcaacgctg

SEQ ID NO: 1843 - DNA, 549 bp, Ctenocephalides felis
  misc_feature (543)..(543): n = unknown
acttacttcaagtcaagcgtcatcgccgttcgtacccaaaacccaaacaagacttattgtgttcatttgtgttgtttagtgctgcatttgaggtcctcaatactatcttgaaataataaaatggctcgtactaaacaaactgcccgtaagtcgaccggtggaaaagctccacggaaacaattagctacgaaggccgcgcgtaaaagtgcgccatccactggaggcgtcaagaaaccccatcgttatcgtccaggtactgttgctcttcgtgaaatccgtcgttatcagaaatccactgaattgttgatccgaaaattgccattccaacgtttggtgagagaaattgcccaggatttcaagactgatctacgtttccagtcagctgctattggtgctctacaggaagccagtgaggcttatctcgtggcttatttgaagatacaaatttgtgcgccattcatgccaagagggtaacaattatgcctaaagatatccagttagcgcggcgaattcgtggtgacggctaaaatcggttataagaancaattt

SEQ ID NO: 1844 - DNA, 549 bp, Ctenocephalides felis
  misc_feature (238)..(238): n = unknown
  misc_feature (409)..(409): n = unknown
  misc_feature (533)..(533): n = unknown
aatttctggtcagactttgaataccgactcaataaacacggctctgtattaaatgctgtattaatcatgctggcgcaacatgctctgcttatagcaatttcaagcgacttaaatgcatatggtgttgtgtgtgagttcgactggaatgatggaaatggtcaggaaggatggcctccaatggatggcagcgaaggaataagaattaccgatatcgatacatcaggaatatttgattcanatgatatgactatcaaggccgcctgagtgcggttttaccgcataccaataacgcttcactcgaggcgtttttcgttatgtataaataaggagcacaccatgcaatatgccattgcagggtggcctgttgctggctgcccttccgaatctttacttgaacgaatcacccgtnaattacgtgacggatggaaacgccttatcgcatacttaatcagcaggagcccaaagaatggatcaaacactatggtatccagactaaatcactatcgcctttatggcgataaaagatgttcgtnaaccgcaccttataaa

SEQ ID NO: 1845 - DNA, 549 bp, Ctenocephalides felis
  misc_feature (491)..(491)
aattcatccgttccgcatatattttgaggagctacaaccaggcgacagcctgttgactccccgccgcacaatgacagaggccgatattgttaactttgcttgcctcagcggcgatcatttctatgcacatatggataagattgctgctgccgaatctattttcggtgagcgggtggtgcatgggtattttgtgctttctgcggctgcgggtctgtttgtcgatgccggtgtcggtccggtcattgctaactacgggctggaaagcttgcgttttatcgaacccgtaaagccaggcgataccatccaggtgcgtctcacctgtaagcgcaagacgctgaaaaaacagcgtagcgcagaagaaaaaccaacaggtgtggtggaatgggctgtagaggtattcaatcagcatcaaaccccggtggcgctgtattcaattctgacgctggtggcaggcagcacggtgatttgtcgattaatcggtgaatgaaggnaacggcgaatagttgcctttatttcactaagtttggacgttgcacattatgcatgatg

SEQ ID NO: 1846 - DNA, 549 bp, Ctenocephalides felis
  misc_feature (17)..(17): n = unknown
  misc_feature (530)..(530): n = unknown
aggaagaagagatggangcctaccgcaaacagaccagtttggaaatcgagcaattgaacatgcgcgttgccgaggctgaaaccaaattgaagaccgaagttcaacgcatcaagaagaagctccagatccaaatcaccgaattggaattgtctttggacgttgccaataagactaacatcgatttgcagaagaccatcaagaagcaatctttgcagttgaccgagatccaggccgcctacgatgatgtccaacgccaattgcaagtgaccttggaccaattgtccgtctcccagagacgcgtccaatctttgactgctgaagtcgaggaagtgcgcagcaactacgaatctttgtcgcgcgccaaacgccaagtcgaacagcagtacgaggagagcgtcgccgcatcaacgagttgacggtaatcaacgtcaatttggcaagctcaagagcaagatcgagcaggaattgtcgctttgagcggagactcgagcaagtccccaggaattgagagtcagcgacgagagatccangcgtcagtcgactgaatca

SEQ ID NO: 1847 - DNA, 549 bp, Ctenocephalides felis
  misc_feature (6)..(6): n = unknown
  misc_feature (30)..(30): n = unknown
  misc_feature (38)..(39): n = unknown
  misc_feature (60)..(60): n = unknown
  misc_feature (109)..(109): n = unknown
  misc_feature (141)..(141): n = unknown
  misc_feature (147)..(147): n = unknown
  misc_feature (160)..(160): n = unknown
  misc_feature (163)..(163): n = unknown
  misc_feature (201)..(201): n = unknown
  misc_feature (250)..(252): n = unknown
  misc_feature (274)..(274): n = unknown
  misc_feature (286)..(286): n = unknown
  misc_feature (296)..(296): n = unknown
  misc_feature (303)..(303): n = unknown
  misc_feature (308)..(309): n = unknown
  misc_feature (329)..(329): n = unknown
  misc_feature (369)..(369): n = unknown
  misc_feature (391)..(391): n = unknown
  misc_feature (424)..(424): n = unknown
  misc_feature (432)..(432): n = unknown
  misc_feature (454)..(454): n = unknown
  misc_feature (457)..(457): n = unknown
  misc_feature (463)..(465): n = unknown
  misc_feature (467)..(467): n = unknown
  misc_feature (470)..(470): n = unknown
  misc_feature (475)..(475): n = unknown
  misc_feature (489)..(489): n = unknown
  misc_feature (493)..(493): n = unknown
  misc_feature (508)..(508): n = unknown
  misc_feature (525)..(525): n = unknown
  misc_feature (529)..(529): n = unknown
  misc_feature (540)..(540): n = unknown
  misc_feature (543)..(543): n = unknown
  misc_feature (548)..(548): n = unknown
gtcttntaaatacatcatgaaaccttttgngggattannattgtgcctggcggtggtganctgcggtgatgtatccgaaaagaaacaagagaaacgcggactggccggnctcggcacgcacggaggcggtgccttactgtnatccgntggaggacacggnggnctcggtggaggatacggtggcggatatggaggtggttntggaggcggtctcggcggtggactcggcggtggatttggcggcggagcnnnattcggcggaggtgctggattnggcggaggattnggaggcggcngctggangtggnngcggtggcggtggtggcggngctggtcttggtggtccagtcacccttggcacacgcagtnacgaactactactgtgacacanggtattccatacgccgtccacaaccttacccantgactgtnacacgcaccgttggagtaccanccntcaaccnntnccnttgtncttccaagactgtncagnctctgtcctcaagtnaccagtgcagtcccctnaccngccatggttgnccnctgcnc

SEQ ID NO: 1848 - DNA, 508 bp, Ctenocephalides felis
  misc_feature (4)..(4): n = unknown
gaancctaaaggtgaaggatacaaaggcagtaaattccaccgtgtcatcaaggacttcatgattcaaggtggtgacttcaccaggggagatggaactggaggccgctcaatttatggagaacgttttgctgatgaaaacttcaagttgaagcattatggtgctggatggttgtccatggcaaatgctggcaaagacactaacggatctcaattctttatcactacaaaagccactggctggttagatggacgtcatgttgtattcggaaaagtgattaagggaatggatgtggtgaggaaaattgaatcaacatcaacagattccagagacaaaccacaacgtgatgttgaaattgtagactctggtgctgaagctgtttctgaaccctacggtgtggctaaagaagatgcaactaattaaatgatttattaattttgataatttttaatcacttcaagacaaattgttctgataaataaaacattttttaaaaaaaaaaaaaaaaaa

SEQ ID NO: 1849 - DNA, 549 bp, Ctenocephalides felis
  misc_feature (18)..(18)
  misc_feature (401)..(401)
  misc_feature (480)..(480): n = unknown
  misc_feature (547)..(547): n = unknown
  misc_feature (549)..(549): n = unknown
aattattggctgggtctnttaaactacaacaagggtaaaaaagatgatgcggcgtactattttgcttcggtagtgaaaaactatccgaagtcaccaaaggctgcagatgcgatgtttaaagtcggcgtcatcatgcaggacaaaggtgacaatgcggctggctaagtcgcgtttttcgtgttcatacacatacgacagcaccgcgaaaccttgcgtgccgtgctgctgggtggcctcttgcgccagggcgctacgcagaatgtcgcggatagcttcggaacggttgttataaccacgacgctggctcaggctgtccagcgtctccagtaaatcgtcatcaagcgtgatggtgactcgttgcatttgcgttaaaccttttctgtggtgcgacggcgcacggngaatgcgggtaataccgcgttttgtagcacacgtccggcgtcagaggaaaaggttaatttctctccaccactgggtttngacgattgtcgtgtcataacattacccgtggaaaagcgttctacagcgtagtcgtggtgatgacagnan

SEQ ID NO: 1850 - DNA, 348 bp, Ctenocephalides felis
taagcatttatgtatgactatgtaaaataaatgaatttatattttatcatttttctaattcaattataatgatgaagaataaaaaaaaattcatcttgtcaaagataacttaaaaaataattaaatataaatagatttatctaaaagcagttcgtcttatgagaatttatattgaaatgctatgttaacttgtatggccgtgttgtattttacaaaataaaacttcttacctaaagtggtgttggtagaagtgtttccaaaaccaaatgtgctagttgctggtttgttaaatgtattattaaataaagagtttgaagtagttgtttgaccaaatcctccaaaaccagt

SEQ ID NO: 1851 - DNA, 436 bp, Ctenocephalides felis
  misc_feature (17)..(17): n = unknown
agcttgtcaaacttctnaataatatttccattcccaataattataaactaattagcctagacgttatatccctatttacaaatgtcccactagacttaatactagacgccatcaccagcagatggagtgaaaattaggccttcacaccacattatctttacattggtttagagaaatcatcaaattcattgtctctaacacctattttgaatttaatggatcattttattaccaaatttttggcaccccaatgggatctcccgcatctccgtctttagtagaaatttccttacaattagtagaaaacaaaatttttaataattataacaaacaaatcttttattaccgatatgtagacgatatcattcttgtattccggaagaagacattaacatatttactgataattttaacaatttaataaaaaactacagtt

SEQ ID NO: 1852 - DNA, 147 bp, Ctenocephalides felis
  misc_feature (1)..(1): n = unknown
ngtaagaaccttcaatagcctcacggggtgttttgaatcctaatcctacattcctgtgaagacgtaaggatttcttttttaaaccgatcttgcggttgaggtttacacccaactgcttctggaaggctcgttcaagtctgatcagcc

SEQ ID NO: 1853 - DNA, 285 bp, Ctenocephalides felis; identical to SEQ ID NO: 1627

SEQ ID NO: 1854 - DNA, 261 bp, Ctenocephalides felis
ctaaatgaaattgtaattttaaatatgtaagaattataaaaaatagaagtaatatgatatattatcaaataataaaatgattaaaattaaagtattgatgataagaaaatttaataataattaataaaaaaaaatataactttaataaatgaatattttatcatcaacaaattacacaggaagaagttagaagtaaataataaaaaaatcttcagtaaactttccaagtattcgctcaggcgtattttagtaactttttgt

SEQ ID NO: 1855 - DNA, 332 bp, Ctenocephalides felis
atccttcagcacatttgcaaccaatataacattctctagaacaaggtccaggtaaatcgttcatgtagttagcacaagttcttggacaagaagtgccacaggaagtaaattcttcattttctgggcaagttgtgttcacagcaggcaaaggatcaacaaggtcttctggaagaatttcacctggaagagtttcttctggaagcgtttcatcacagtagacaaaagcagccaacacaaggcaactcaatacagtaactaatataactttcattttgtaacaaacttttcttcactctaaaatagatctaaaaattcaaatcgatcgatcgcag

SEQ ID NO: 1856 - DNA, 341 bp, Ctenocephalides felis
gagcatggtttggacgcagaaataagtctccacaagctatggctgcttgtgtcagtcgtgcttggtggcgttggcagcacaaatatattcacccaagaaaagctggaattgcaggattctatcaattgactgttggatcaatgattttgttctatgctttgaactacggcaagatctctgctcataagaactacaaataccactaaaaccaaacatcttacgatggtagtgtgtctgttgatggcagaataaatttctaaatgtaaaatctgtatcaatatacaattcaatatattaaattacacgagaaaaaaaaaaaaaaaaaaaaaaaaaaaaaaaaa

SEQ ID NO: 1857 - DNA, 238 bp, Ctenocephalides felis
ttctcatccaatcaaatttttctaatctttccataataatcggaagaacgagcattcccggtgcggccattactattcttgataaaacaacttgactgattccctttgcagcagctaaccgtgactttcctataatgcggccttcactatctacaacgtctattcctgctaataattctgtttgacgcatcatcggaatattaacgcaattagcagctgctactgcggcaaaaggaac

SEQ ID NO: 1858 - DNA, 263 bp, Ctenocephalides felis
  misc_feature (20)..(21): n = unknown
  misc_feature (30)..(31): n = unknown
  misc_feature (37)..(37): n = unknown
  misc_feature (39)..(40): n = unknown
  misc_feature (51)..(51): n = unknown
  misc_feature (54)..(54): n = unknown
  misc_feature (57)..(57): n = unknown
  misc_feature (59)..(59): n = unknown
  misc_feature (63)..(63): n = unknown
  misc_feature (68)..(68): n = unknown
  misc_feature (73)..(73): n = unknown
  misc_feature (79)..(79): n = unknown
  misc_feature (254)..(254): n = unknown
ccaaattttattgtgatatnngtacacaanntgtganannttttgtggaancanaanangtantggtnttgcngttaantattataaggatactaatagtgatgttgtaagagttaggactaatagatgagtcttcttcaattttgataaacatatttttataatctgtgttaaattttgcacttgtaatgctgtgctttttaatgaataaacatgcaatattaaacttcgaaaaaaaaaaaaaaagttaattncttgcttgt

SEQ ID NO: 1859 - DNA, 613 bp, Ctenocephalides felis
  misc_feature (32)..(32): n = unknown
agctgcccactatagggctaaagcggccgccngggcaggtgttggacaaaaatatttaaaattaagaagaaataaatgaaatatttataattattaaagaatcttgtatcgtgcaaaacataaatgatatataaattaatttcgatctcttaataaaagtattatttcaattaccttatttgatgagaaaatgcacaacaaaatcctggtcctggttgtttaccatgtcgtcctgatgtttaccatggtagtcgccaagactacacatgaagacaccaatgataattctacagacgtcttactggagttgcccaaatcgatgaacaatgatgaaaagttgttcctgacaactggtcaaattttggaagggactactgtatatagtgacgaattggcagatttcaatataacagaaaatacagtaaacgtaacagccgacaaagtagccctaaaagaaatcacacctgaccatcaccatccagtagtgacttctacacaaaaaacaattttaaacgcatccacgaccgttgaaaaaaatcctggacatcaaaccagtatttcagaagaatctaccacaaaattggtaaaaacaaccactgaagacaaccacctc

SEQ ID NO: 1860 - DNA, 613 bp, Ctenocephalides felis
  misc_feature (582)..(582): n = unknown
gaggtggttgtcttcagtggttgtttttaccaattttgtggtagattcttctgaaatactggtttgatgtccaggatttttttcaacggtcgtggatgcgtttaaaattgttttttgtgtagaagtcactactggatggtgatggtcaggtgtgatttcttttagggctactttgtcggctgttacgtttactgtattttctgttatattgaaatctgccaattcgtcactatatacagtagtcccttccaaaatttgaccagttgtcaggaacaacttttcatcattgttcatcgatttgggcaactccagtaagacgtctgtagaattatcattggtgtcttcatgtgtagtcttggcgactaccatggtaaacatcaggacgacatggtaaacaaccaggaccaggattttgttgtgcattttctcatcaaataaggtaattgaaataatacttttattaagagatcgaaattaatttatatatcatttatgttttgcacgatacaagattctttaataattataaatatttcatttatttcttcttaattttaaatatttttgtccaacacctgcccnggcggccgctttagccctatagtgggcagct

SEQ ID NO: 1861 - DNA, 2739 bp, Ctenocephalides felis
  misc_feature (32)..(32): n = unknown
  CDS (191)..(2206)
agctgcccactatagggctaaagcggccgccngggcaggtgttggacaaaaatatttaaaattaagaagaaataaatgaaatatttataattattaaagaatcttgtatcgtgcaaaacataaatgatatataaattaatttcgatctcttaataaaagtattatttcaattaccttatttgatgagaaaatgcacaacaaaatcctggtcctggttgtttaccatgtcgtcctgatgtttaccatggtagtcgccaagactacacatgaagacaccaatgataattctacagacgtcttactggagttgcccaaatcgatgaacaatgatgaaaagttgttcctgacaactggtcaaattttggaagggactactgtatatagtgacgaattggcagatttcaatataacagaaaatacagtaaacgtaacagccgacaaagtagccctaaaagaaatcacacctgaccatcaccatccagtagtgacttctacacaaaaaacaattttaaacgcatccacgaccgttgaaaaaaatcctggacatcaaaccagtatttcagaagaatctaccacaaaattggtaaaaacaaccactgaagacaaccacctcggtgtaaagagcctgaatgaacctggtgatgaacaagaattaaaaaaaccatcatcacatggtaaggagcatatttctttaccagtggcttcaccagtaccaccagtatcgcatatcttccaggctacaccaggagacctttgtccagccttcgacgatgcagatcgcttcacccagacagaacttttgtccaggctgacaaacgattgcaggtacgataagctggagcgccctttggggcctcacaatggtgcagggccgctcccggtggccgccagaatttacgtgtattttatacaaaatacggacgcgcacgaattgtcattttccgtgaccgtcctcctccaatttcgttaccaggacgccagattggcctacaaaaaagtggcacccaccaggacggtcatcatgggcgaatcgcagctcagggacaaaatctgggtaccacatgtattcgttgccaacgagagatcttcccaggttatgggcacagatgcccaatctaaggacatgttggtgtcagtagctcctgatggtacagtcgtcttttcggtcaggatgaaggcaactttgtactgttggatgaatttaaggaaatttccttttgatgaacaacagtgtcagatgatgttggaaagttggaagtacaatacaagtgaactcctattgacttgggaaccaactgcaccagtaactttagcaccagaactacatttgaccgaatatgtccttactgacatgtgggtaaatgaaacagttgtcaaggctgatttggatgacctgagacacggagcatttggtgggacatacagtgccttaagtttcacgattcaaataagtcgtgaaatgggttactatttaatggattactttttgccatcagtaatgatcgtgtcgtgttcctgggtaagtttttggctggcagcagaccaatcagcacccagagtcaccttaggtacaagcaccatgttatcatttatcactttagcaagtgcccaaggaaaaactttacccaaagtatcgtacatcaaagcttcagaaatctggtttttaggttgcaccgggtttatttttgggagtttagtggaattcgcgtttgtcaacacaatttggagacgaaggaaaaatgtggaattgaaaaaagtcaacagcaagtatattttgaagtcaactttgacgccgaggttggcccggaaggagtttcatgcttcgtttaattcgaatcctggaggtggtaataaggatgatcaggatttgggaagagggattagggtctttccgccgcctttggtcaaggctaggtcttgttccagtctggataggagtaatggatccgggaattttttgagcgtccatggaaatgatcacaaagttccaacaataacagcacaatgtgcagacgatgccgcaagtgaccagatttcagtttgtgtcgatggggaaaacgaagaacctgcacaaattgttcaccacacctggacgacgatgacacctcaagaaatttccatgtggattgacaaaaggtccagaatttgtttcccgatagcttttgctatatttaactttttttattggatatttgtttattatttataaacacacttaatatacttatagttttaataattaataaatttataaaataattaaaaataaatatatgtaaaatttaaaggaaacgtgaatagaatcaaaagagattcttattggattattccattattaataggattcttactagacaatattaatgattttatattatatatcacttataacttttgaacggtttgttaaaaatgaatacaatatttgacaaatttatataaaattaaacaatttataatattgtcgaacatcttaccaccctacagcgactcagtatactcgaaaatcgctattgaaatatcttacacaatttagtcattcctatttcacatataatagttaataattaaaattgaaattttaaattaaaaaataatgatactggaaattttaattttaattattaattattatatgaataattaattttactgcatagttataattataattataaatattaaatttttagaataaatactcagctggtctgaaaaaaaaaaaaaaaaaaaaaaaaa

SEQ ID NO: 1862 - protein, 672 aa, Ctenocephalides felis
MHNKILVLVVYHVVLMFTMVVAKTTHEDTNDNSTDVLLELPKSMNNDEKLFLTTGQILEGTTVYSDELADFNITENTVNVTADKVALKEITPDHHHPVVTSTQKTILNASTTVEKNPGHQTSISEESTTKLVKTTTEDNHLGVKSLNEPGDEQELKKPSSHGKEHISLPVASPVPPVSHIFQATPGDLCPAFDDADRFTQTELLSRLTNDCRYDKLERPLGPHNGAGPLPVAARIYVYFIQNTDAHELSFSVTVLLQFRYQDARLAYKKVAPTRTVIMGESQLRDKIWVPHVFVANERSSQVMGTDAQSKDMLVSVAPDGTVVFSVRMKATLYCWMNLRKFPFDEQQCQMMLESWKYNTSELLLTWEPTAPVTLAPELHLTEYVLTDMWVNETVVKADLDDLRHGAFGGTYSALSFTIQISREMGYYLMDYFLPSVMIVSCSWVSFWLAADQSAPRVTLGTSTMLSFITLASAQGKTLPKVSYIKASEIWFLGCTGFIFGSLVEFAFVNTIWRRRKNVELKKVNSKYILKSTLTPRLARKEFHASFNSNPGGGNKDDQDLGRGIRVFPPPLVKARSCSSLDRSNGSGNFLSVHGNDHKVPTITAQCADDAASDQISVCVDGENEEPAQIVHHTWTTMTPQEISMWIDKRSRICFPIAFAIFNFFYWIFVYYL

SEQ ID NO: 1863 - DNA, 2739 bp, Ctenocephalides felis
  misc_feature (2708)..(2708): n = unknown
tttttttttttttttttttttttttcagaccagctgagtatttattctaaaaatttaatatttataattataattataactatgcagtaaaattaattattcatataataattaataattaaaattaaaatttccagtatcattattttttaatttaaaatttcaattttaattattaactattatatgtgaaataggaatgactaaattgtgtaagatatttcaatagcgattttcgagtatactgagtcgctgtagggtggtaagatgttcgacaatattataaattgtttaattttatataaatttgtcaaatattgtattcatttttaacaaaccgttcaaaagttataagtgatatataatataaaatcattaatattgtctagtaagaatcctattaataatggaataatccaataagaatctcttttgattctattcacgtttcctttaaattttacatatatttatttttaattattttataaatttattaattattaaaactataagtatattaagtgtgtttataaataataaacaaatatccaataaaaaaagttaaatatagcaaaagctatcgggaaacaaattctggaccttttgtcaatccacatggaaatttcttgaggtgtcatcgtcgtccaggtgtggtgaacaatttgtgcaggttcttcgttttccccatcgacacaaactgaaatctggtcacttgcggcatcgtctgcacattgtgctgttattgttggaactttgtgatcatttccatggacgctcaaaaaattcccggatccattactcctatccagactggaacaagacctagccttgaccaaaggcggcggaaagaccctaatccctcttcccaaatcctgatcatccttattaccacctccaggattcgaattaaacgaagcatgaaactccttccgggccaacctcggcgtcaaagttgacttcaaaatatacttgctgttgacttttttcaattccacatttttccttcgtctccaaattgtgttgacaaacgcgaattccactaaactcccaaaaataaacccggtgcaacctaaaaaccagatttctgaagctttgatgtacgatactttgggtaaagtttttccttgggcacttgctaaagtgataaatgataacatggtgcttgtacctaaggtgactctgggtgctgattggtctgctgccagccaaaaacttacccaggaacacgacacgatcattactgatggcaaaaagtaatccattaaatagtaacccatttcacgacttatttgaatcgtgaaacttaaggcactgtatgtcccaccaaatgctccgtgtctcaggtcatccaaatcagccttgacaactgtttcatttacccacatgtcagtaaggacatattcggtcaaatgtagttctggtgctaaagttactggtgcagttggttcccaagtcaataggagttcacttgtattgtacttccaactttccaacatcatctgacactgttgttcatcaaaaggaaatttccttaaattcatccaacagtacaaagttgccttcatcctgaccgaaaagacgactgtaccatcaggagctactgacaccaacatgtccttagattgggcatctgtgcccataacctgggaagatctctcgttggcaacgaatacatgtggtacccagattttgtccctgagctgcgattcgcccatgatgaccgtcctggtgggtgccacttttttgtaggccaatctggcgtcctggtaacgaaattggaggaggacggtcacggaaaatgacaattcgtgcgcgtccgtattttgtataaaatacacgtaaattctggcggccaccgggagcggccctgcaccattgtgaggccccaaagggcgctccagcttatcgtacctgcaatcgtttgtcagcctggacaaaagttctgtctgggtgaagcgatctgcatcgtcgaaggctggacaaaggtctcctggtgtagcctggaagatatgcgatactggtggtactggtgaagccactggtaaagaaatatgctccttaccatgtgatgatggtttttttaattcttgttcatcaccaggttcattcaggctctttacaccgaggtggttgtcttcagtggttgtttttaccaattttgtggtagattcttctgaaatactggtttgatgtccaggatttttttcaacggtcgtggatgcgtttaaaattgttttttgtgtagaagtcactactggatggtgatggtcaggtgtgatttcttttagggctactttgtcggctgttacgtttactgtattttctgttatattgaaatctgccaattcgtcactatatacagtagtcccttccaaaatttgaccagttgtcaggaacaacttttcatcattgttcatcgatttgggcaactccagtaagacgtctgtagaattatcattggtgtcttcatgtgtagtcttggcgactaccatggtaaacatcaggacgacatggtaaacaaccaggaccaggattttgttgtgcattttctcatcaaataaggtaattgaaataatacttttattaagagatcgaaattaatttatatatcatttatgttttgcacgatacaagattctttaataattataaatatttcatttatttcttcttaattttaaatatttttgtccaacacctgcccnggcggccgctttagccctatagtgggcagct

SEQ ID NO: 1864 - DNA, 2016 bp, Ctenocephalides felis
  CDS (1)..(2016)
atgcacaacaaaatcctggtcctggttgtttaccatgtcgtcctgatgtttaccatggtagtcgccaagactacacatgaagacaccaatgataattctacagacgtcttactggagttgcccaaatcgatgaacaatgatgaaaagttgttcctgacaactggtcaaattttggaagggactactgtatatagtgacgaattggcagatttcaatataacagaaaatacagtaaacgtaacagccgacaaagtagccctaaaagaaatcacacctgaccatcaccatccagtagtgacttctacacaaaaaacaattttaaacgcatccacgaccgttgaaaaaaatcctggacatcaaaccagtatttcagaagaatctaccacaaaattggtaaaaacaaccactgaagacaaccacctcggtgtaaagagcctgaatgaacctggtgatgaacaagaattaaaaaaaccatcatcacatggtaaggagcatatttctttaccagtggcttcaccagtaccaccagtatcgcatatcttccaggctacaccaggagacctttgtccagccttcgacgatgcagatcgcttcacccagacagaacttttgtccaggctgacaaacgattgcaggtacgataagctggagcgccctttggggcctcacaatggtgcagggccgctcccggtggccgccagaatttacgtgtattttatacaaaatacggacgcgcacgaattgtcattttccgtgaccgtcctcctccaatttcgttaccaggacgccagattggcctacaaaaaagtggcacccaccaggacggtcatcatgggcgaatcgcagctcagggacaaaatctgggtaccacatgtattcgttgccaacgagagatcttcccaggttatgggcacagatgcccaatctaaggacatgttggtgtcagtagctcctgatggtacagtcgtcttttcggtcaggatgaaggcaactttgtactgttggatgaatttaaggaaatttccttttgatgaacaacagtgtcagatgatgttggaaagttggaagtacaatacaagtgaactcctattgacttgggaaccaactgcaccagtaactttagcaccagaactacatttgaccgaatatgtccttactgacatgtgggtaaatgaaacagttgtcaaggctgatttggatgacctgagacacggagcatttggtgggacatacagtgccttaagtttcacgattcaaataagtcgtgaaatgggttactatttaatggattactttttgccatcagtaatgatcgtgtcgtgttcctgggtaagtttttggctggcagcagaccaatcagcacccagagtcaccttaggtacaagcaccatgttatcatttatcactttagcaagtgcccaaggaaaaactttacccaaagtatcgtacatcaaagcttcagaaatctggtttttaggttgcaccgggtttatttttgggagtttagtggaattcgcgtttgtcaacacaatttggagacgaaggaaaaatgtggaattgaaaaaagtcaacagcaagtatattttgaagtcaactttgacgccgaggttggcccggaaggagtttcatgcttcgtttaattcgaatcctggaggtggtaataaggatgatcaggatttgggaagagggattagggtctttccgccgcctttggtcaaggctaggtcttgttccagtctggataggagtaatggatccgggaattttttgagcgtccatggaaatgatcacaaagttccaacaataacagcacaatgtgcagacgatgccgcaagtgaccagatttcagtttgtgtcgatggggaaaacgaagaacctgcacaaattgttcaccacacctggacgacgatgacacctcaagaaatttccatgtggattgacaaaaggtccagaatttgtttcccgatagcttttgctatatttaactttttttattggatatttgtttattattta

SEQ ID NO: 1865 - protein, 672 aa, Ctenocephalides felis; identical to SEQ ID NO: 1862

SEQ ID NO: 1866 - DNA, 2016 bp, Ctenocephalides felis; identical to SEQ ID NO: 1864

SEQ ID NO: 1867 - DNA, 2080 bp, Ctenocephalides felis
  CDS (45)..(1868)
aaagtgatgcaacaattattttcaaaatacaaaagtgttaaaaaatgggcgttaaaaatatatatttatactgcattctgatatgcctgctacattatgcatcttataccaaaactgaatctattaccaacaattctttggaagaattgtacacaaacacttctgccaaaacagattccattactcttttatcaaaaaccagtctaccgcctgatcaaaatgccacgattgaaaatcctgatccagtgcttcctgaaaagggctccgctgaacaagaacaacacagctcgatgtctatattcttcgtgctttgtgtgctggctttagggattcttttaattcatttcatgttacaaacagggtttcagtatttacctgaaagtattgttgtagttttcttaggtgctttaatcggcttgataattaatttaatgtcgtctaaaaatattgcaaattggaagaatgaagaagccttttcacccacagcgtttttcttagtgcttctaccgcctataatatttgaatccgggtataatttgcataaaggtaatttttttcaaaatattggttccatcctggtgtttgctatatttggaacagccatatcagcctttgttgtcggtgctggtgtgtatttactaggaatggcagatgttgcttataacttaagctttgttgaatcctttgctttcggttcattaatttctgcagtagaccctgtagctaccgtagctattttccatgctttagacgtggacccagttttaaacatgttggtgttcggagaaagtattttaaatgatgctatttcaattgttttaacaactgcagttttggaatccaacaatcctttaatgacgactgctgaagctgtagtctccggtttaaataggttttgtttaatgttctttgcttcggctggtatcggtgtagtctttgccttaattagtgctcttttgttgaaacatgttgatcttagaaagtatccgtccttagagttaggtatgatgttggtgtttacttatgcaccttatgttttggcagaaggaattcatttatcaggtataatggcgatattattctgtggcattgtgatgtcccattacacacatttcaatttatcaacggttacacaaataactatgcagcagacgatgagaactttggcttttattgcagaaacttgtgtgtttgcttatttaggaatggctatatttagttttcgtcacagagtggaacctgccttagttatttggagcattgtactttgcttaattggaagagctgcaaatatatttcctttatcctggcttgtgaatcaatttagggagcacaaaatcactaaaaagatggcatttatcatgtggttcagtggtttgcgaggtgccatatcatatgcactttccttacatttagaattttctgatgaaacacgtcatgtaataattacaacgacacttataattgtactttgcacaacacttatattcgggggtgctacgatgcctttgctgaaatttttgcaggcgaacaagaagacccgttcagccacaagacgtacaagacgtcagcaaaaagcaataacattaagcaaaacccgagaatggggatcagcaatcgattcagaactactaagtgaattaacaaccgaagaagaacgtgacgtcacattcacccaagtaagacgaggcctagaattcatacgactggaccacaaatacttgagaccgtttttcactcgaagattcacccaccaggaattgaaggattgcaaaagtcaaatgacggatcttacgaataaatggtatcaaactataagagtgagtcctcagatgagtgatgatgatgacgttagtacgtgcagtacttaatttaaatttaaatttaatgctaattgaccaaaagtgttatgtgatatatataacagagttacctgtattttaatttatgttttaagttttaagataagtgcagatttgtcagtattttttctacaagggtagaatactgttgtatagctaatgtgtaaataaaaagtaataaatttgatttattgcactctaaaaaaaaaaaaaaaaaa

SEQ ID NO: 1868 - protein, 608 aa, Ctenocephalides felis
MGVKNIYLYCILICLLHYASYTKTESITNNSLEELYTNTSAKTDSITLLSKTSLPPDQNATIENPDPVLPEKGSAEQEQHSSMSIFFVLCVLALGILLIHFMLQTGFQYLPESIVVVFLGALIGLIINLMSSKNIANWKNEEAFSPTAFFLVLLPPIIFESGYNLHKGNFFQNIGSILVFAIFGTAISAFVVGAGVYLLGMADVAYNLSFVESFAFGSLISAVDPVATVAIFHALDVDPVLNMLVFGESILNDAISIVLTTAVLESNNPLMTTAEAVVSGLNRFCLMFFASAGIGVVFALISALLLKHVDLRKYPSLELGMMLVFTYAPYVLAEGIHLSGIMAILFCGIVMSHYTHFNLSTVTQITMQQTMRTLAFIAETCVFAYLGMAIFSFRHRVEPALVIWSIVLCLIGRAANIFPLSWLVNQFREHKITKKMAFIMWFSGLRGAISYALSLHLEFSDETRHVIITTTLIIVLCTTLIFGGATMPLLKFLQANKKTRSATRRTRRQQKAITLSKTREWGSAIDSELLSELTTEEERDVTFTQVRRGLEFIRLDHKYLRPFFTRRFTHQELKDCKSQMTDLTNKWYQTIRVSPQMSDDDDVSTCST

SEQ ID NO: 1869 - DNA, 2080 bp, Ctenocephalides felis
ttttttttttttttttttagagtgcaataaatcaaatttattactttttatttacacattagctatacaacagtattctacccttgtagaaaaaatactgacaaatctgcacttatcttaaaacttaaaacataaattaaaatacaggtaactctgttatatatatcacataacacttttggtcaattagcattaaatttaaatttaaattaagtactgcacgtactaacgtcatcatcatcactcatctgaggactcactcttatagtttgataccatttattcgtaagatccgtcatttgacttttgcaatccttcaattcctggtgggtgaatcttcgagtgaaaaacggtctcaagtatttgtggtccagtcgtatgaattctaggcctcgtcttacttgggtgaatgtgacgtcacgttcttcttcggttgttaattcacttagtagttctgaatcgattgctgatccccattctcgggttttgcttaatgttattgctttttgctgacgtcttgtacgtcttgtggctgaacgggtcttcttgttcgcctgcaaaaatttcagcaaaggcatcgtagcacccccgaatataagtgttgtgcaaagtacaattataagtgtcgttgtaattattacatgacgtgtttcatcagaaaattctaaatgtaaggaaagtgcatatgatatggcacctcgcaaaccactgaaccacatgataaatgccatctttttagtgattttgtgctccctaaattgattcacaagccaggataaaggaaatatatttgcagctcttccaattaagcaaagtacaatgctccaaataactaaggcaggttccactctgtgacgaaaactaaatatagccattcctaaataagcaaacacacaagtttctgcaataaaagccaaagttctcatcgtctgctgcatagttatttgtgtaaccgttgataaattgaaatgtgtgtaatgggacatcacaatgccacagaataatatcgccattatacctgataaatgaattccttctgccaaaacataaggtgcataagtaaacaccaacatcatacctaactctaaggacggatactttctaagatcaacatgtttcaacaaaagagcactaattaaggcaaagactacaccgataccagccgaagcaaagaacattaaacaaaacctatttaaaccggagactacagcttcagcagtcgtcattaaaggattgttggattccaaaactgcagttgttaaaacaattgaaatagcatcatttaaaatactttctccgaacaccaacatgtttaaaactgggtccacgtctaaagcatggaaaatagctacggtagctacagggtctactgcagaaattaatgaaccgaaagcaaaggattcaacaaagcttaagttataagcaacatctgccattcctagtaaatacacaccagcaccgacaacaaaggctgatatggctgttccaaatatagcaaacaccaggatggaaccaatattttgaaaaaaattacctttatgcaaattatacccggattcaaatattataggcggtagaagcactaagaaaaacgctgtgggtgaaaaggcttcttcattcttccaatttgcaatatttttagacgacattaaattaattatcaagccgattaaagcacctaagaaaactacaacaatactttcaggtaaatactgaaaccctgtttgtaacatgaaatgaattaaaagaatccctaaagccagcacacaaagcacgaagaatatagacatcgagctgtgttgttcttgttcagcggagcccttttcaggaagcactggatcaggattttcaatcgtggcattttgatcaggcggtagactggtttttgataaaagagtaatggaatctgttttggcagaagtgtttgtgtacaattcttccaaagaattgttggtaatagattcagttttggtataagatgcataatgtagcaggcatatcagaatgcagtataaatatatatttttaacgcccattttttaacacttttgtattttgaaaataattgttgcatcacttt

SEQ ID NO: 1870 - DNA, 1824 bp, Ctenocephalides felis
atgggcgttaaaaatatatatttatactgcattctgatatgcctgctacattatgcatcttataccaaaactgaatctattaccaacaattctttggaagaattgtacacaaacacttctgccaaaacagattccattactcttttatcaaaaaccagtctaccgcctgatcaaaatgccacgattgaaaatcctgatccagtgcttcctgaaaagggctccgctgaacaagaacaacacagctcgatgtctatattcttcgtgctttgtgtgctggctttagggattcttttaattcatttcatgttacaaacagggtttcagtatttacctgaaagtattgttgtagttttcttaggtgctttaatcggcttgataattaatttaatgtcgtctaaaaatattgcaaattggaagaatgaagaagccttttcacccacagcgtttttcttagtgcttctaccgcctataatatttgaatccgggtataatttgcataaaggtaatttttttcaaaatattggttccatcctggtgtttgctatatttggaacagccatatcagcctttgttgtcggtgctggtgtgtatttactaggaatggcagatgttgcttataacttaagctttgttgaatcctttgctttcggttcattaatttctgcagtagaccctgtagctaccgtagctattttccatgctttagacgtggacccagttttaaacatgttggtgttcggagaaagtattttaaatgatgctatttcaattgttttaacaactgcagttttggaatccaacaatcctttaatgacgactgctgaagctgtagtctccggtttaaataggttttgtttaatgttctttgcttcggctggtatcggtgtagtctttgccttaattagtgctcttttgttgaaacatgttgatcttagaaagtatccgtccttagagttaggtatgatgttggtgtttacttatgcaccttatgttttggcagaaggaattcatttatcaggtataatggcgatattattctgtggcattgtgatgtcccattacacacatttcaatttatcaacggttacacaaataactatgcagcagacgatgagaactttggcttttattgcagaaacttgtgtgtttgcttatttaggaatggctatatttagttttcgtcacagagtggaacctgccttagttatttggagcattgtactttgcttaattggaagagctgcaaatatatttcctttatcctggcttgtgaatcaatttagggagcacaaaatcactaaaaagatggcatttatcatgtggttcagtggtttgcgaggtgccatatcatatgcactttccttacatttagaattttctgatgaaacacgtcatgtaataattacaacgacacttataattgtactttgcacaacacttatattcgggggtgctacgatgcctttgctgaaatttttgcaggcgaacaagaagacccgttcagccacaagacgtacaagacgtcagcaaaaagcaataacattaagcaaaacccgagaatggggatcagcaatcgattcagaactactaagtgaattaacaaccgaagaagaacgtgacgtcacattcacccaagtaagacgaggcctagaattcatacgactggaccacaaatacttgagaccgtttttcactcgaagattcacccaccaggaattgaaggattgcaaaagtcaaatgacggatcttacgaataaatggtatcaaactataagagtgagtcctcagatgagtgatgatgatgacgttagtacgtgcagtact

SEQ ID NO: 1871 - DNA, 1824 bp, Ctenocephalides felis
agtactgcacgtactaacgtcatcatcatcactcatctgaggactcactcttatagtttgataccatttattcgtaagatccgtcatttgacttttgcaatccttcaattcctggtgggtgaatcttcgagtgaaaaacggtctcaagtatttgtggtccagtcgtatgaattctaggcctcgtcttacttgggtgaatgtgacgtcacgttcttcttcggttgttaattcacttagtagttctgaatcgattgctgatccccattctcgggttttgcttaatgttattgctttttgctgacgtcttgtacgtcttgtggctgaacgggtcttcttgttcgcctgcaaaaatttcagcaaaggcatcgtagcacccccgaatataagtgttgtgcaaagtacaattataagtgtcgttgtaattattacatgacgtgtttcatcagaaaattctaaatgtaaggaaagtgcatatgatatggcacctcgcaaaccactgaaccacatgataaatgccatctttttagtgattttgtgctccctaaattgattcacaagccaggataaaggaaatatatttgcagctcttccaattaagcaaagtacaatgctccaaataactaaggcaggttccactctgtgacgaaaactaaatatagccattcctaaataagcaaacacacaagtttctgcaataaaagccaaagttctcatcgtctgctgcatagttatttgtgtaaccgttgataaattgaaatgtgtgtaatgggacatcacaatgccacagaataatatcgccattatacctgataaatgaattccttctgccaaaacataaggtgcataagtaaacaccaacatcatacctaactctaaggacggatactttctaagatcaacatgtttcaacaaaagagcactaattaaggcaaagactacaccgataccagccgaagcaaagaacattaaacaaaacctatttaaaccggagactacagcttcagcagtcgtcattaaaggattgttggattccaaaactgcagttgttaaaacaattgaaatagcatcatttaaaatactttctccgaacaccaacatgtttaaaactgggtccacgtctaaagcatggaaaatagctacggtagctacagggtctactgcagaaattaatgaaccgaaagcaaaggattcaacaaagcttaagttataagcaacatctgccattcctagtaaatacacaccagcaccgacaacaaaggctgatatggctgttccaaatatagcaaacaccaggatggaaccaatattttgaaaaaaattacctttatgcaaattatacccggattcaaatattataggcggtagaagcactaagaaaaacgctgtgggtgaaaaggcttcttcattcttccaatttgcaatatttttagacgacattaaattaattatcaagccgattaaagcacctaagaaaactacaacaatactttcaggtaaatactgaaaccctgtttgtaacatgaaatgaattaaaagaatccctaaagccagcacacaaagcacgaagaatatagacatcgagctgtgttgttcttgttcagcggagcccttttcaggaagcactggatcaggattttcaatcgtggcattttgatcaggcggtagactggtttttgataaaagagtaatggaatctgttttggcagaagtgtttgtgtacaattcttccaaagaattgttggtaatagattcagttttggtataagatgcataatgtagcaggcatatcagaatgcagtataaatatatatttttaacgcccat

SEQ ID NO: 1872 - DNA, 2383 bp, Ctenocephalides felis
  CDS (60)..(845)
  misc_feature (2226)..(2226): n = unknown
  misc_feature (2242)..(2242): n = unknown
  misc_feature (2321)..(2321): n = unknown
  misc_feature (2340)..(2340): n = unknown
  misc_feature (2349)..(2349): n = unknown
  misc_feature (2352)..(2352): n = unknown
  misc_feature (2360)..(2360): n = unknown
  misc_feature (2362)..(2362): n = unknown
aattcttgtgtgtagaataaaaaacatatttgaaacgttcatataataaaaagtgcaacatgtcagatgaaatgcaagaaaacggaactattaatggtgaagtgccagaaattgaacttatcattaaggcatccaccatagatggtcgacgtaaaggagcttgtttattttgtcaagaatattttatggatttgtacctgctagcagaacttaaaactatcagtttaaaggttacaacagtagacatgcaaaaacctccaccggatttccgtacaaattttgaagcgacgccgccgccaattctaatcgacaatggcctggccgtgctagaaaacgacaaaatcgaacgtcacatcatgaagagtgtccctggaggacacaatctttttgttcaggataaagaagtggcaacactcatcgagaatttgtactctaaattgaagttggttttagtcaaaaaggatgacgtaaaaagcaatagtctgctgagccacctgaggaaaatcaacgaccatttggcgcggcgcggcacgagattcctaacgggcgacaccatgtgctgcttcgactgcgaactgatgcccaggttacaacacatcagggtcgccgccaagtatttcgtcgaatttgaaattccgagcaatctaaccgccttatggcgttatatgtatcacatgtaccagttggacgcattcacccagtcgtgcccagccgaccaagatatcatcaaccactataaactgcaacagcagaggatcagcaataaccagatgatgaaaatgaagaagcacgaggagctagaaacgccaacgttcaccacatcgattccagtcgacgtttcaggctgataggaaagaagtatttaaaacaaaattagtaatttggataatactaaacatgattatctgtatatgttaccgttccaaataaattattcatattaaaatacgattagtaagcgttatgatgtatccaaagttcgattaccatttttacaaatgccatcagttaggaatcttttctttgcttaatacaccaagagtttcattataattataacgtactataatatatttcgcaattgcaattggcatatcgttcaatattaatattacaaagctgccagtgatacgtcaatcatatttttgaacatattttatcttatgtttcagtaattctgtaagaatttttagatgcttatgtataaattggtgatatagcataaataacatatacgaatttgtatattttgaagtactatctgtgtaaactatccaaaactaacattcaaaatttgttttttgaaaaaaattatcttacaatatgtgtactataatataatgtatttagtattaaatgtttgagaaactaatttagttaagttgtatacaataaattataatcgtgttatattatgtttatatttacaaattttcgtgatggagtttaatgttagatgaatatattaaaatgtatgttctaacaattgtaatattaatgttaattttaaccgtaaattaaggaaaacattgttttgatgactacttagcttccgatccagaggtgatttagacatttagttagcattttaaaatattgtgtagctaacatttcgtgtgattttgacaactaatcagttatttaagaaatgtgcatataattattatatacatattattttacatacctgtttagtattcaaaaaacttgtcaattacttcgcacaaaagaacattgtgagtataataatatcatattatgcaaacattctttatttacgtgtagtttacttgaagtatcttggttttctttgctttttttcatttgattcagtaaaattaattcaaatctaacagtattttgcatagcagttatacgaaaattaaccagtgcttaacaatatttaaaatatttatataattcattaactagttatagtaaaaaaatatataaattcattttaaattaaaagacataatatattttacatattgtttaaatcttgtactttgccattttctctgtttgtttcatgtaatcttcggaagcgtagcaaatgttgtgtatattagtaatgtacagttgtataaaacataaattgtaagtccacttacaggcacatgctattgtcttattgaatttatttgttctaccaggaaagtgctttatagattttactaaatatatattaagaaaagcgttctctgttgaattgtaattaatccnttttgtaagatttacngcaagtatgaagaaatgttaaattttgttaaatttcatgtattgtatatgatattcgcacgtacttatgaaatgtatgncagtcaaatgctgaatttnttttaatanacnatctttgnantacctaaaaaaaaaaaaaaaa

SEQ ID NO: 1873 - protein, 262 aa, Ctenocephalides felis
MSDEMQENGTINGEVPEIELIIKASTIDGRRKGACLFCQEYFMDLYLLAELKTISLKVTTVDMQKPPPDFRTNFEATPPPILIDNGLAVLENDKIERHIMKSVPGGHNLFVQDKEVATLIENLYSKLKLVLVKKDDVKSNSLLSHLRKINDHLARRGTRFLTGDTMCCFDCELMPRLQHIRVAAKYFVEFEIPSNLTALWRYMYHMYQLDAFTQSCPADQDIINHYKLQQQRISNNQMMKMKKHEELETPTFTTSIPVDVSG

SEQ ID NO: 1874 - DNA, 2383 bp, Ctenocephalides felis
  misc_feature (22)..(22): n = unknown
  misc_feature (24)..(24): n = unknown
  misc_feature (32)..(32): n = unknown
  misc_feature (35)..(35): n = unknown
  misc_feature (44)..(44): n = unknown
  misc_feature (63)..(63): n = unknown
  misc_feature (142)..(142): n = unknown
  misc_feature (158)..(158): n = unknown
ttttttttttttttttaggtantncaaagatngtntattaaaanaaattcagcatttgactgncatacatttcataagtacgtgcgaatatcatatacaatacatgaaatttaacaaaatttaacatttcttcatacttgcngtaaatcttacaaaanggattaattacaattcaacagagaacgcttttcttaatatatatttagtaaaatctataaagcactttcctggtagaacaaataaattcaataagacaatagcatgtgcctgtaagtggacttacaatttatgttttatacaactgtacattactaatatacacaacatttgctacgcttccgaagattacatgaaacaaacagagaaaatggcaaagtacaagatttaaacaatatgtaaaatatattatgtcttttaatttaaaatgaatttatatatttttttactataactagttaatgaattatataaatattttaaatattgttaagcactggttaattttcgtataactgctatgcaaaatactgttagatttgaattaattttactgaatcaaatgaaaaaaagcaaagaaaaccaagatacttcaagtaaactacacgtaaataaagaatgtttgcataatatgatattattatactcacaatgttcttttgtgcgaagtaattgacaagttttttgaatactaaacaggtatgtaaaataatatgtatataataattatatgcacatttcttaaataactgattagttgtcaaaatcacacgaaatgttagctacacaatattttaaaatgctaactaaatgtctaaatcacctctggatcggaagctaagtagtcatcaaaacaatgttttccttaatttacggttaaaattaacattaatattacaattgttagaacatacattttaatatattcatctaacattaaactccatcacgaaaatttgtaaatataaacataatataacacgattataatttattgtatacaacttaactaaattagtttctcaaacatttaatactaaatacattatattatagtacacatattgtaagataatttttttcaaaaaacaaattttgaatgttagttttggatagtttacacagatagtacttcaaaatatacaaattcgtatatgttatttatgctatatcaccaatttatacataagcatctaaaaattcttacagaattactgaaacataagataaaatatgttcaaaaatatgattgacgtatcactggcagctttgtaatattaatattgaacgatatgccaattgcaattgcgaaatatattatagtacgttataattataatgaaactcttggtgtattaagcaaagaaaagattcctaactgatggcatttgtaaaaatggtaatcgaactttggatacatcataacgcttactaatcgtattttaatatgaataatttatttggaacggtaacatatacagataatcatgtttagtattatccaaattactaattttgttttaaatacttctttcctatcagcctgaaacgtcgactggaatcgatgtggtgaacgttggcgtttctagctcctcgtgcttcttcattttcatcatctggttattgctgatcctctgctgttgcagtttatagtggttgatgatatcttggtcggctgggcacgactgggtgaatgcgtccaactggtacatgtgatacatataacgccataaggcggttagattgctcggaatttcaaattcgacgaaatacttggcggcgaccctgatgtgttgtaacctgggcatcagttcgcagtcgaagcagcacatggtgtcgcccgttaggaatctcgtgccgcgccgcgccaaatggtcgttgattttcctcaggtggctcagcagactattgctttttacgtcatcctttttgactaaaaccaacttcaatttagagtacaaattctcgatgagtgttgccacttctttatcctgaacaaaaagattgtgtcctccagggacactcttcatgatgtgacgttcgattttgtcgttttctagcacggccaggccattgtcgattagaattggcggcggcgtcgcttcaaaatttgtacggaaatccggtggaggtttttgcatgtctactgttgtaacctttaaactgatagttttaagttctgctagcaggtacaaatccataaaatattcttgacaaaataaacaagctcctttacgtcgaccatctatggtggatgccttaatgataagttcaatttctggcacttcaccattaatagttccgttttcttgcatttcatctgacatgttgcactttttattatatgaacgtttcaaatatgttttttattctacacacaagaatt

SEQ ID NO: 1875 - DNA, 786 bp, Ctenocephalides felis
atgtcagatgaaatgcaagaaaacggaactattaatggtgaagtgccagaaattgaacttatcattaaggcatccaccatagatggtcgacgtaaaggagcttgtttattttgtcaagaatattttatggatttgtacctgctagcagaacttaaaactatcagtttaaaggttacaacagtagacatgcaaaaacctccaccggatttccgtacaaattttgaagcgacgccgccgccaattctaatcgacaatggcctggccgtgctagaaaacgacaaaatcgaacgtcacatcatgaagagtgtccctggaggacacaatctttttgttcaggataaagaagtggcaacactcatcgagaatttgtactctaaattgaagttggttttagtcaaaaaggatgacgtaaaaagcaatagtctgctgagccacctgaggaaaatcaacgaccatttggcgcggcgcggcacgagattcctaacgggcgacaccatgtgctgcttcgactgcgaactgatgcccaggttacaacacatcagggtcgccgccaagtatttcgtcgaatttgaaattccgagcaatctaaccgccttatggcgttatatgtatcacatgtaccagttggacgcattcacccagtcgtgcccagccgaccaagatatcatcaaccactataaactgcaacagcagaggatcagcaataaccagatgatgaaaatgaagaagcacgaggagctagaaacgccaacgttcaccacatcgattccagtcgacgtttcaggc

SEQ ID NO: 1876 - DNA, 786 bp, Ctenocephalides felis
gcctgaaacgtcgactggaatcgatgtggtgaacgttggcgtttctagctcctcgtgcttcttcattttcatcatctggttattgctgatcctctgctgttgcagtttatagtggttgatgatatcttggtcggctgggcacgactgggtgaatgcgtccaactggtacatgtgatacatataacgccataaggcggttagattgctcggaatttcaaattcgacgaaatacttggcggcgaccctgatgtgttgtaacctgggcatcagttcgcagtcgaagcagcacatggtgtcgcccgttaggaatctcgtgccgcgccgcgccaaatggtcgttgattttcctcaggtggctcagcagactattgctttttacgtcatcctttttgactaaaaccaacttcaatttagagtacaaattctcgatgagtgttgccacttctttatcctgaacaaaaagattgtgtcctccagggacactcttcatgatgtgacgttcgattttgtcgttttctagcacggccaggccattgtcgattagaattggcggcggcgtcgcttcaaaatttgtacggaaatccggtggaggtttttgcatgtctactgttgtaacctttaaactgatagttttaagttctgctagcaggtacaaatccataaaatattcttgacaaaataaacaagctcctttacgtcgaccatctatggtggatgccttaatgataagttcaatttctggcacttcaccattaatagttccgttttcttgcatttcatctgacat

SEQ ID NO: 1877 - DNA, 457 bp, Ctenocephalides felis
  misc_feature (446)..(446): n = unknown
gcaaacaacaaggtccgctgatgcaagatccacacgattgtcacgcatattacacatgtctagaaattggatcattaccgaaacattttaattgtaataaaggtgcttatttcaatacagtcaaattaaaatgcgtgaaaggaaattgcgaaaatagcacagaaattcctcttcctgagcttccagacatttgcgatgaagtaggacctttggtgcaagatccaaacgattgccgcaagtattattcatgcgtcacgattggaaaagaacctgaacattttacgtgcaataaaggggcgtattttgatcgagaaagattacggtgtgtcagaggatcttgttaacaaatattgttatataacaaagttcaatctttaattattatttagaagaatttgaaaatgtatatttaatgttttttaataaaatagtttattggcaatttnaaaaaaaaaaa

SEQ ID NO: 1878 - DNA, 1291 bp, Ctenocephalides felis
  misc_feature (1280)..(1280): n = unknown
gattagctgcccactatagggctaaagcggccgccgggtggtgttctgcagatccaagcccatgtttctcggaaggttctataacttgcaccggtccaggagtttttcctgatccgtatgattgtcagcgttatcatgaatgtaaaactgcaaatgaatcatctaagcctgtcgagtgtgggggttacaaggcttataatgttatagaaaataattgtagcctgaacatgaatcatcaatcgtgtaaacgcttacaatttcattgtgatactataggagatgaaaatgcttggccgagcaatagaaatatatattataggtgcaccgaaaaaaccttgtggttcaatagcaacaaaatattatatcctttattatatcggtgtgatgagagtgagatatatgatgcagtgcagagagtttgcgtaagagatgaaaccaccacgacgcctgccacaacgccaaccgaatcttccacgtctagtgaaacaaccacgacgtctgccacaacatcaaccgaatcttccacgtctagtgaaacaaccacgacgtctgccacaacaccaaccgaatcttccacgtctagtgaaacaaccacgacgtctgccacaacaccaaccgaatcttccacgtctagtgaaacaaccacgacgtctgccacaacaccaaccgaatcttccacgtctagtgaaacaaccacgacgtctgccacaacaccaaccgaatcttccacgtctggtgaaacaaccacgacgtctgccacaacaccaaccgaaccttccacaaagcctacttctacggaaactcccgcaacaaaaccaccgcaagaaataccatgcaaacaacaaggtccgctgatgcaagatccacacgattgtcacgcatattacacatgtctagaaattggatcattaccgaaacattttaattgtaataaaggtgcttatttcaatacagtcaaattaaaatgcgtgaaaggaaattgcgaaaatagcacagaaattcctcttcctgagcttccagacatttgcgatgaagtaggacctttggtgcaagatccaaacgattgccgcaagtattattcatgcgtcacgattggaaaagaacctgaacattttacgtgcaataaaggggcgtattttgatcgagaaagattacggtgtgtcagaggatcttgttaacaaatattgttatataacaaagttcaatctttaattattatttagaagaatttgaaaatgtatatttaatgttttttaataaaatagtttattggcaatttnaaaaaaaaaaa

SEQ ID NO: 1879 - DNA, 1291 bp, Ctenocephalides felis
  misc_feature (12)..(12): n = unknown
tttttttttttnaaattgccaataaactattttattaaaaaacattaaatatacattttcaaattcttctaaataataattaaagattgaactttgttatataacaatatttgttaacaagatcctctgacacaccgtaatctttctcgatcaaaatacgcccctttattgcacgtaaaatgttcaggttcttttccaatcgtgacgcatgaataatacttgcggcaatcgtttggatcttgcaccaaaggtcctacttcatcgcaaatgtctggaagctcaggaagaggaatttctgtgctattttcgcaatttcctttcacgcattttaatttgactgtattgaaataagcacctttattacaattaaaatgtttcggtaatgatccaatttctagacatgtgtaatatgcgtgacaatcgtgtggatcttgcatcagcggaccttgttgtttgcatggtatttcttgcggtggttttgttgcgggagtttccgtagaagtaggctttgtggaaggttcggttggtgttgtggcagacgtcgtggttgtttcaccagacgtggaagattcggttggtgttgtggcagacgtcgtggttgtttcactagacgtggaagattcggttggtgttgtggcagacgtcgtggttgtttcactagacgtggaagattcggttggtgttgtggcagacgtcgtggttgtttcactagacgtggaagattcggttggtgttgtggcagacgtcgtggttgtttcactagacgtggaagattcggttgatgttgtggcagacgtcgtggttgtttcactagacgtggaagattcggttggcgttgtggcaggcgtcgtggtggtttcatctcttacgcaaactctctgcactgcatcatatatctcactctcatcacaccgatataataaaggatataatattttgttgctattgaaccacaaggttttttcggtgcacctataatatatatttctattgctcggccaagcattttcatctcctatagtatcacaatgaaattgtaagcgtttacacgattgatgattcatgttcaggctacaattattttctataacattataagccttgtaacccccacactcgacaggcttagatgattcatttgcagttttacattcatgataacgctgacaatcatacggatcaggaaaaactcctggaccggtgcaagttatagaaccttccgagaaacatgggcttggatctgcagaacaccacccggcggccgctttagccctatagtgggcagctaatc

SEQ ID NO: 1880 - DNA, 279 bp, Ctenocephalides felis
caatgatcaagtcagttataattgtggccaacttttggctattcgtagccttgcaatcgattgataatcggcagactaacaactgctctgagattggtgttgatggttttttttgtctcaactgcagcgtcacagctttttgtggtagaggacctacgggtgaattcaacaccgtgtctacaagtccatgtagttctggtgaagtttgcagtacctgggcgggtagatgttctgcagatccaagcccatgtttctcggaaggttctataacttgcaccg

SEQ ID NO: 1881 - DNA, 279 bp, Ctenocephalides felis
cggtgcaagttatagaaccttccgagaaacatgggcttggatctgcagaacatctacccgcccaggtactgcaaacttcaccagaactacatggacttgtagacacggtgttgaattcacccgtaggtcctctaccacaaaaagctgtgacgctgcagttgagacaaaaaaaaccatcaacaccaatctcagagcagttgttagtctgccgattatcaatcgattgcaaggctacgaatagccaaaagttggccacaattataactgacttgatcattg

SEQ ID NO: 1882 - DNA, 1477 bp, Ctenocephalides felis
  CDS (3)..(1361)
  misc_feature (1466)..(1466): n = unknown
caatgatcaagtcagttataattgtggccaacttttggctattcgtagccttgcaatcgattgataatcggcagactaacaactgctctgagattggtgttgatggttttttttgtctcaactgcagcgtcacagctttttgtggtagaggacctacgggtgaattcaacaccgtgtctacaagtccatgtagttctggtgaagtttgcagtacctgggcgggtagatgttctgcagatccaagcccatgtttctcggaaggttctataacttgcaccggtccaggagtttttcctgatccgtatgattgtcagcgttatcatgaatgtaaaactgcaaatgaatcatctaagcctgtcgagtgtgggggttacaaggcttataatgttatagaaaataattgtagcctgaacatgaatcatcaatcgtgtaaacgcttacaatttcattgtgatactataggagatgaaaatgcttggccgagcaatagaaatatatattataggtgcaccgaaaaaaccttgtggttcaatagcaacaaaatattatatcctttattatatcggtgtgatgagagtgagatatatgatgcagtgcagagagtttgcgtaagagatgaaaccaccacgacgcctgccacaacgccaaccgaatcttccacgtctagtgaaacaaccacgacgtctgccacaacatcaaccgaatcttccacgtctagtgaaacaaccacgacgtctgccacaacaccaaccgaatcttccacgtctagtgaaacaaccacgacgtctgccacaacaccaaccgaatcttccacgtctagtgaaacaaccacgacgtctgccacaacaccaaccgaatcttccacgtctagtgaaacaaccacgacgtctgccacaacaccaaccgaatcttccacgtctggtgaaacaaccacgacgtctgccacaacaccaaccgaaccttccacaaagcctacttctacggaaactcccgcaacaaaaccaccgcaagaaataccatgcaaacaacaaggtccgctgatgcaagatccacacgattgtcacgcatattacacatgtctagaaattggatcattaccgaaacattttaattgtaataaaggtgcttatttcaatacagtcaaattaaaatgcgtgaaaggaaattgcgaaaatagcacagaaattcctcttcctgagcttccagacatttgcgatgaagtaggacctttggtgcaagatccaaacgattgccgcaagtattattcatgcgtcacgattggaaaagaacctgaacattttacgtgcaataaaggggcgtattttgatcgagaaagattacggtgtgtcagaggatcttgttaacaaatattgttatataacaaagttcaatctttaattattatttagaagaatttgaaaatgtatatttaatgttttttaataaaatagtttattggcaatttnaaaaaaaaaaa

SEQ ID NO: 1883 - protein, 453 aa, Ctenocephalides felis
MIKSVIIVANFWLFVALQSIDNRQTNNCSEIGVDGFFCLNCSVTAFCGRGPTGEFNTVSTSPCSSGEVCSTWAGRCSADPSPCFSEGSITCTGPGVFPDPYDCQRYHECKTANESSKPVECGGYKAYNVIENNCSLNMNHQSCKRLQFHCDTIGDENAWPSNRNIYYRCTEKTLWFNSNKILYPLLYRCDESEIYDAVQRVCVRDETTTTPATTPTESSTSSETTTTSATTSTESSTSSETTTTSATTPTESSTSSETTTTSATTPTESSTSSETTTTSATTPTESSTSSETTTTSATTPTESSTSGETTTTSATTPTEPSTKPTSTETPATKPPQEIPCKQQGPLMQDPHDCHAYYTCLEIGSLPKHFNCNKGAYFNTVKLKCVKGNCENSTEIPLPELPDICDEVGPLVQDPNDCRKYYSCVTIGKEPEHFTCNKGAYFDRERLRCVRGSC

SEQ ID NO: 1884 - DNA, 1477 bp, Ctenocephalides felis
  misc_feature (12)..(12): n = unknown
tttttttttttnaaattgccaataaactattttattaaaaaacattaaatatacattttcaaattcttctaaataataattaaagattgaactttgttatataacaatatttgttaacaagatcctctgacacaccgtaatctttctcgatcaaaatacgcccctttattgcacgtaaaatgttcaggttcttttccaatcgtgacgcatgaataatacttgcggcaatcgtttggatcttgcaccaaaggtcctacttcatcgcaaatgtctggaagctcaggaagaggaatttctgtgctattttcgcaatttcctttcacgcattttaatttgactgtattgaaataagcacctttattacaattaaaatgtttcggtaatgatccaatttctagacatgtgtaatatgcgtgacaatcgtgtggatcttgcatcagcggaccttgttgtttgcatggtatttcttgcggtggttttgttgcgggagtttccgtagaagtaggctttgtggaaggttcggttggtgttgtggcagacgtcgtggttgtttcaccagacgtggaagattcggttggtgttgtggcagacgtcgtggttgtttcactagacgtggaagattcggttggtgttgtggcagacgtcgtggttgtttcactagacgtggaagattcggttggtgttgtggcagacgtcgtggttgtttcactagacgtggaagattcggttggtgttgtggcagacgtcgtggttgtttcactagacgtggaagattcggttgatgttgtggcagacgtcgtggttgtttcactagacgtggaagattcggttggcgttgtggcaggcgtcgtggtggtttcatctcttacgcaaactctctgcactgcatcatatatctcactctcatcacaccgatataataaaggatataatattttgttgctattgaaccacaaggttttttcggtgcacctataatatatatttctattgctcggccaagcattttcatctcctatagtatcacaatgaaattgtaagcgtttacacgattgatgattcatgttcaggctacaattattttctataacattataagccttgtaacccccacactcgacaggcttagatgattcatttgcagttttacattcatgataacgctgacaatcatacggatcaggaaaaactcctggaccggtgcaagttatagaaccttccgagaaacatgggcttggatctgcagaacatctacccgcccaggtactgcaaacttcaccagaactacatggacttgtagacacggtgttgaattcacccgtaggtcctctaccacaaaaagctgtgacgctgcagttgagacaaaaaaaaccatcaacaccaatctcagagcagttgttagtctgccgattatcaatcgattgcaaggctacgaatagccaaaagttggccacaattataactgacttgatcattg

SEQ ID NO: 1885 - DNA, 1359 bp, Ctenocephalides felis
atgatcaagtcagttataattgtggccaacttttggctattcgtagccttgcaatcgattgataatcggcagactaacaactgctctgagattggtgttgatggttttttttgtctcaactgcagcgtcacagctttttgtggtagaggacctacgggtgaattcaacaccgtgtctacaagtccatgtagttctggtgaagtttgcagtacctgggcgggtagatgttctgcagatccaagcccatgtttctcggaaggttctataacttgcaccggtccaggagtttttcctgatccgtatgattgtcagcgttatcatgaatgtaaaactgcaaatgaatcatctaagcctgtcgagtgtgggggttacaaggcttataatgttatagaaaataattgtagcctgaacatgaatcatcaatcgtgtaaacgcttacaatttcattgtgatactataggagatgaaaatgcttggccgagcaatagaaatatatattataggtgcaccgaaaaaaccttgtggttcaatagcaacaaaatattatatcctttattatatcggtgtgatgagagtgagatatatgatgcagtgcagagagtttgcgtaagagatgaaaccaccacgacgcctgccacaacgccaaccgaatcttccacgtctagtgaaacaaccacgacgtctgccacaacatcaaccgaatcttccacgtctagtgaaacaaccacgacgtctgccacaacaccaaccgaatcttccacgtctagtgaaacaaccacgacgtctgccacaacaccaaccgaatcttccacgtctagtgaaacaaccacgacgtctgccacaacaccaaccgaatcttccacgtctagtgaaacaaccacgacgtctgccacaacaccaaccgaatcttccacgtctggtgaaacaaccacgacgtctgccacaacaccaaccgaaccttccacaaagcctacttctacggaaactcccgcaacaaaaccaccgcaagaaataccatgcaaacaacaaggtccgctgatgcaagatccacacgattgtcacgcatattacacatgtctagaaattggatcattaccgaaacattttaattgtaataaaggtgcttatttcaatacagtcaaattaaaatgcgtgaaaggaaattgcgaaaatagcacagaaattcctcttcctgagcttccagacatttgcgatgaagtaggacctttggtgcaagatccaaacgattgccgcaagtattattcatgcgtcacgattggaaaagaacctgaacattttacgtgcaataaaggggcgtattttgatcgagaaagattacggtgtgtcagaggatcttgt

SEQ ID NO: 1886 - DNA, 1359 bp, Ctenocephalides felis
acaagatcctctgacacaccgtaatctttctcgatcaaaatacgcccctttattgcacgtaaaatgttcaggttcttttccaatcgtgacgcatgaataatacttgcggcaatcgtttggatcttgcaccaaaggtcctacttcatcgcaaatgtctggaagctcaggaagaggaatttctgtgctattttcgcaatttcctttcacgcattttaatttgactgtattgaaataagcacctttattacaattaaaatgtttcggtaatgatccaatttctagacatgtgtaatatgcgtgacaatcgtgtggatcttgcatcagcggaccttgttgtttgcatggtatttcttgcggtggttttgttgcgggagtttccgtagaagtaggctttgtggaaggttcggttggtgttgtggcagacgtcgtggttgtttcaccagacgtggaagattcggttggtgttgtggcagacgtcgtggttgtttcactagacgtggaagattcggttggtgttgtggcagacgtcgtggttgtttcactagacgtggaagattcggttggtgttgtggcagacgtcgtggttgtttcactagacgtggaagattcggttggtgttgtggcagacgtcgtggttgtttcactagacgtggaagattcggttgatgttgtggcagacgtcgtggttgtttcactagacgtggaagattcggttggcgttgtggcaggcgtcgtggtggtttcatctcttacgcaaactctctgcactgcatcatatatctcactctcatcacaccgatataataaaggatataatattttgttgctattgaaccacaaggttttttcggtgcacctataatatatatttctattgctcggccaagcattttcatctcctatagtatcacaatgaaattgtaagcgtttacacgattgatgattcatgttcaggctacaattattttctataacattataagccttgtaacccccacactcgacaggcttagatgattcatttgcagttttacattcatgataacgctgacaatcatacggatcaggaaaaactcctggaccggtgcaagttatagaaccttccgagaaacatgggcttggatctgcagaacatctacccgcccaggtactgcaaacttcaccagaactacatggacttgtagacacggtgttgaattcacccgtaggtcctctaccacaaaaagctgtgacgctgcagttgagacaaaaaaaaccatcaacaccaatctcagagcagttgttagtctgccgattatcaatcgattgcaaggctacgaatagccaaaagttggccacaattataactgacttgatcat

SEQ ID NO: 1887 - DNA, 406 bp, Ctenocephalides felis; identical to SEQ ID NO: 1419
  CDS (20)..(262)

SEQ ID NO: 1888 - protein, 81 aa, Ctenocephalides felis
MKGTLLILSCLVIMISAEYADVDVCQDLDDGTFLADSNNCQNFFICDGGRAWKMYCPGSLLWNDHEGTCDYAQNVECYQPE

SEQ ID NO: 1889 - DNA, 406 bp, Ctenocephalides felis
tttttttttttttttttttgtctttatattgattttattaaaacggaataaatttataggaggagagcaatgaagataaatttattataacagtagtatgaaatatagtttcagaaaatcgctgtcagatattaaaatgttttattctggttggtaacattctacattttgtgcgtaatcacatgttccttcgtgatcattccataaaagtgatcctggacaatacattttccaagctcggcctccatcacaaatgaagaaattttggcaattgtttgaatcagcaagaaaagttccatcgtccaaatcttggcacacatctacgtcagcatattcggcacttatcatgatcacaagacatgataatattaataatgttcctttcattttgttattttaaattaac

SEQ ID NO: 1890 - DNA, 243 bp, Ctenocephalides felis
atgaaaggaacattattaatattatcatgtcttgtgatcatgataagtgccgaatatgctgacgtagatgtgtgccaagatttggacgatggaacttttcttgctgattcaaacaattgccaaaatttcttcatttgtgatggaggccgagcttggaaaatgtattgtccaggatcacttttatggaatgatcacgaaggaacatgtgattacgcacaaaatgtagaatgttaccaaccagaa

SEQ ID NO: 1891 - DNA, 243 bp, Ctenocephalides felis
ttctggttggtaacattctacattttgtgcgtaatcacatgttccttcgtgatcattccataaaagtgatcctggacaatacattttccaagctcggcctccatcacaaatgaagaaattttggcaattgtttgaatcagcaagaaaagttccatcgtccaaatcttggcacacatctacgtcagcatattcggcacttatcatgatcacaagacatgataatattaataatgttcctttcat

SEQ ID NO: 1892 - DNA, 974 bp, Ctenocephalides felis
ttaatgtcgacggaacgcctttaacagtaaataaagaagtatttgcatcattggatgagcccgcaccaggagtagtacctactcctgaacctacacctgtaccgaaacccgagcaaaaatgtaaaaaagtaaaatttagttgcgtgaattcgtgcagttcacccgaaatgcagtattgtccggaaataggagcagatccggttaaggaatcctgtagcccagatcaagtgtgcgctgatcaaagtggatatctacagtgcaccactaaagaaagtacagtctgcaaagtacaaggtttcaaatgtccgtcaccatcgagattttatccaaatataaatgattgtcaaagctattattattgtgacgaaaatagtataggaacccaatattattgccccgcaaattttgcatatgatccgttacgtcataattgcggacctatggctctgggcacaaaatgctatacagttacatgtcctgcacagcctaaggtgcttccgtacattggtgataaatcattgtacgtcgtatgtatggccggaagaggaaccgtattgcaatgcgaagaacccgccgagttttccccaaggagcgaaacctgtgtcgggcaatgccgagcacgtggaaaatttgctttcaagaacgacgcaacatgccggaagttcttcacgtgtttacgtcctaaaggagagccagttcctgatcaatgtccgattggaacagtatttaaccaagctactcaaagctgcaacacaggaacttgcgagaggaaacctaaattatattaatatattgatgaagtattcaacaaaagaaactatacaaaatatgtactttgttttactttatgtgttatataaaaaaatattatggttgaacacaggctcgcaaatatgataaggcatttaagaattttacaatttagatttttttaaatccatgaatatatttgttctaatcaaaaaaaaaaaaaa

SEQ ID NO: 1893 - DNA, 974 bp, Ctenocephalides felis; identical to SEQ ID NO: 1892

SEQ ID NO: 1894 - DNA, 1043 bp, Ctenocephalides felis
tgttttatatcacattggtttttattagttttgtggcgttatctgtcgttaccgcttatgatggtgagtttaatgtcgacggaacgcctttaacagtaaataaagaagtatttgcatcattggatgagcccgcaccaggagtagtacctactcctgaacctacacctgtaccgaaacccgagcaaaaatgtaaaaaagtaaaatttagttgcgtgaattcgtgcagttcacccgaaatgcagtattgtccggaaataggagcagatccggttaaggaatcctgtagcccagatcaagtgtgcgctgatcaaagtggatatctacagtgcaccactaaagaaagtacagtctgcaaagtacaaggtttcaaatgtccgtcaccatcgagattttatccaaatataaatgattgtcaaagctattattattgtgacgaaaatagtataggaacccaatattattgccccgcaaattttgcatatgatccgttacgtcataattgcggacctatggctctgggcacaaaatgctatacagttacatgtcctgcacagcctaaggtgcttccgtacattggtgataaatcattgtacgtcgtatgtatggccggaagaggaaccgtattgcaatgcgaagaacccgccgagttttccccaaggagcgaaacctgtgtcgggcaatgccgagcacgtggaaaatttgctttcaagaacgacgcaacatgccggaagttcttcacgtgtttacgtcctaaaggagagccagttcctgatcaatgtccgattggaacagtatttaaccaagctactcaaagctgcaacacaggaacttgcgagaggaaacctaaattatattaatatattgatgaagtattcaacaaaagaaactatacaaaatatgtactttgttttactttatgtgttatataaaaaaatattatggttgaacacaggctcgcaaatatgataaggcatttaagaattttacaatttagatttttttaaatccatgaatatatttgttctaatcaaaaaaaaaaaaaa

SEQ ID NO: 1895 - DNA, 1043 bp, Ctenocephalides felis
ttttttttttttttgattagaacaaatatattcatggatttaaaaaaatctaaattgtaaaattcttaaatgccttatcatatttgcgagcctgtgttcaaccataatatttttttatataacacataaagtaaaacaaagtacatattttgtatagtttcttttgttgaatacttcatcaatatattaatataatttaggtttcctctcgcaagttcctgtgttgcagctttgagtagcttggttaaatactgttccaatcggacattgatcaggaactggctctcctttaggacgtaaacacgtgaagaacttccggcatgttgcgtcgttcttgaaagcaaattttccacgtgctcggcattgcccgacacaggtttcgctccttggggaaaactcggcgggttcttcgcattgcaatacggttcctcttccggccatacatacgacgtacaatgatttatcaccaatgtacggaagcaccttaggctgtgcaggacatgtaactgtatagcattttgtgcccagagccataggtccgcaattatgacgtaacggatcatatgcaaaatttgcggggcaataatattgggttcctatactattttcgtcacaataataatagctttgacaatcatttatatttggataaaatctcgatggtgacggacatttgaaaccttgtactttgcagactgtactttctttagtggtgcactgtagatatccactttgatcagcgcacacttgatctgggctacaggattccttaaccggatctgctcctatttccggacaatactgcatttcgggtgaactgcacgaattcacgcaactaaattttacttttttacatttttgctcgggtttcggtacaggtgtaggttcaggagtaggtactactcctggtgcgggctcatccaatgatgcaaatacttctttatttactgttaaaggcgttccgtcgacattaaactcaccatcataagcggtaacgacagataacgccacaaaactaataaaaaccaatgtgatataaaaca

SEQ ID NO: 1896 - DNA, 1062 bp, Ctenocephalides felis
  CDS (19)..(873)
gtaacatatttattaagaatgttttatatcacattggtttttattagttttgtggcgttatctgtcgttaccgcttatgatggtgagtttaatgtcgacggaacgcctttaacagtaaataaagaagtatttgcatcattggatgagcccgcaccaggagtagtacctactcctgaacctacacctgtaccgaaacccgagcaaaaatgtaaaaaagtaaaatttagttgcgtgaattcgtgcagttcacccgaaatgcagtattgtccggaaataggagcagatccggttaaggaatcctgtagcccagatcaagtgtgcgctgatcaaagtggatatctacagtgcaccactaaagaaagtacagtctgcaaagtacaaggtttcaaatgtccgtcaccatcgagattttatccaaatataaatgattgtcaaagctattattattgtgacgaaaatagtataggaacccaatattattgccccgcaaattttgcatatgatccgttacgtcataattgcggacctatggctctgggcacaaaatgctatacagttacatgtcctgcacagcctaaggtgcttccgtacattggtgataaatcattgtacgtcgtatgtatggccggaagaggaaccgtattgcaatgcgaagaacccgccgagttttccccaaggagcgaaacctgtgtcgggcaatgccgagcacgtggaaaatttgctttcaagaacgacgcaacatgccggaagttcttcacgtgtttacgtcctaaaggagagccagttcctgatcaatgtccgattggaacagtatttaaccaagctactcaaagctgcaacacaggaacttgcgagaggaaacctaaattatattaatatattgatgaagtattcaacaaaagaaactatacaaaatatgtactttgttttactttatgtgttatataaaaaaatattatggttgaacacaggctcgcaaatatgataaggcatttaagaattttacaatttagatttttttaaatccatgaatatatttgttctaatcaaaaaaaaaaaaaa

SEQ ID NO: 1897 - protein, 285 aa, Ctenocephalides felis
MFYITLVFISFVALSVVTAYDGEFNVDGTPLTVNKEVFASLDEPAPGVVPTPEPTPVPKPEQKCKKVKFSCVNSCSSPEMQYCPEIGADPVKESCSPDQVCADQSGYLQCTTKESTVCKVQGFKCPSPSRFYPNINDCQSYYYCDENSIGTQYYCPANFAYDPLRHNCGPMALGTKCYTVTCPAQPKVLPYIGDKSLYVVCMAGRGTVLQCEEPAEFSPRSETCVGQCRARGKFAFKNDATCRKFFTCLRPKGEPVPDQCPIGTVFNQATQSCNTGTCERKPKLY

SEQ ID NO: 1898 - DNA, 1062 bp, Ctenocephalides felis; identical to SEQ ID NO: 1896

SEQ ID NO: 1899 - DNA, 855 bp, Ctenocephalides felis
atgttttatatcacattggtttttattagttttgtggcgttatctgtcgttaccgcttatgatggtgagtttaatgtcgacggaacgcctttaacagtaaataaagaagtatttgcatcattggatgagcccgcaccaggagtagtacctactcctgaacctacacctgtaccgaaacccgagcaaaaatgtaaaaaagtaaaatttagttgcgtgaattcgtgcagttcacccgaaatgcagtattgtccggaaataggagcagatccggttaaggaatcctgtagcccagatcaagtgtgcgctgatcaaagtggatatctacagtgcaccactaaagaaagtacagtctgcaaagtacaaggtttcaaatgtccgtcaccatcgagattttatccaaatataaatgattgtcaaagctattattattgtgacgaaaatagtataggaacccaatattattgccccgcaaattttgcatatgatccgttacgtcataattgcggacctatggctctgggcacaaaatgctatacagttacatgtcctgcacagcctaaggtgcttccgtacattggtgataaatcattgtacgtcgtatgtatggccggaagaggaaccgtattgcaatgcgaagaacccgccgagttttccccaaggagcgaaacctgtgtcgggcaatgccgagcacgtggaaaatttgctttcaagaacgacgcaacatgccggaagttcttcacgtgtttacgtcctaaaggagagccagttcctgatcaatgtccgattggaacagtatttaaccaagctactcaaagctgcaacacaggaacttgcgagaggaaacctaaattatat

SEQ ID NO: 1900 - DNA, 855 bp, Ctenocephalides felis
atataatttaggtttcctctcgcaagttcctgtgttgcagctttgagtagcttggttaaatactgttccaatcggacattgatcaggaactggctctcctttaggacgtaaacacgtgaagaacttccggcatgttgcgtcgttcttgaaagcaaattttccacgtgctcggcattgcccgacacaggtttcgctccttggggaaaactcggcgggttcttcgcattgcaatacggttcctcttccggccatacatacgacgtacaatgatttatcaccaatgtacggaagcaccttaggctgtgcaggacatgtaactgtatagcattttgtgcccagagccataggtccgcaattatgacgtaacggatcatatgcaaaatttgcggggcaataatattgggttcctatactattttcgtcacaataataatagctttgacaatcatttatatttggataaaatctcgatggtgacggacatttgaaaccttgtactttgcagactgtactttctttagtggtgcactgtagatatccactttgatcagcgcacacttgatctgggctacaggattccttaaccggatctgctcctatttccggacaatactgcatttcgggtgaactgcacgaattcacgcaactaaattttacttttttacatttttgctcgggtttcggtacaggtgtaggttcaggagtaggtactactcctggtgcgggctcatccaatgatgcaaatacttctttatttactgttaaaggcgttccgtcgacattaaactcaccatcataagcggtaacgacagataacgccacaaaactaataaaaaccaatgtgatataaaacat

SEQ ID NO: 1901 - DNA, 1875 bp, Ctenocephalides felis
  CDS (44)..(1633)
acaaaacggtttaattgaatctgtagtttggaaattaataaatatggacagtaacacggggattcaaataatagcttccaaagaaccaaaaccaaggcagtttgaagatgcgttggcactcacaggttttggaaaattcaattaccttcttctggtcgtgagtggatgcgtattagtatgtgttttgatggaaactcttggaatgagttttgtcgttccttcagcacaatgtgatctggaattaacaacaaaacaaaaaggaatattaagcgctatagcttttataggtattataagcagttcacatttatggggatttttagccgatacgagagggaggcggaaagtgattatgcctacacttcttcttgcatttttttgtaccttggcatctagttttgtaaattcagtttggctgtttattttgctgcgatatttcaatggatttttcgtatctggaggaagtgcaacaatatatgcatatttaggagaatttcataatcctaggcatcgcagcagggctattatgggagcgtcaagcatcttcggatttgcgtgtcttgcattaccgacggttgcatggttaattataaatcagaaatggtcattctatattgactttttgggatatacatacaagccctggaggttgtatatggttgcatgtggtttgccatcactgctttgttgttttgctttgtggaaattaccagaaagtcccaaatttttgatgaatcagggaagaaacgaagaagctcgtcaaattattgccaaaatgtatagaattaatactggtaaaccagaaagtgaattccccgtatcatcaatcttagatgaatatccaggagtggatggtgaaaatacaaataaaacaaagaaatcatttttaagaactgtatgggatcaaactgctccgctgtttatgggtgagcacatgaaaaaaacactcattgcatgtactctgcaattcggaatatttgccacatctaacggcatgtacatgtggtttcccgatatcataagtaaaatgacagaatttcaaaacgctcatccaggagtaccaagtacaatatgctacgttgtccaaaattcatcaatgcttagggcggacgacttcattgatactacgaatagtacgaccgagtgtaaagacacaatggaagaacaggcatttatgcattctttaatgttggaagctggatatgcgattggatttcccataataggtgctattattaactctgtgggaaagcttccaattcttgtattcgtgatggtctcatgcgggatttgtggaataatttgtgcatttattgaacatttaacaatagcatcatatttatatttgtggttgctggtttgcggaattgctgtgacagtggtaaacgcggcattagtagatctgtaccctacacaactcagggcaatggcagtatgtatatctttaatgatgggtcgattaggaagtgttgttggaagcaatgttgtaggaataattctagattataattgcgatttaacatttttaatatcaggaacatctctgatagcatgtggagtgattgcattctttataccgaacatttatcagaagcaagtggatagaagaacgagcattgcttcatatggaccataaccatatttccgtcgtgtgttgtgaaatgcaattatactttgagaaagtattatcaattacaaagaaaattcagagttgctactgaatcattttctaaaacatcgacatgaaaattaataactctttattgttattagattcgatgtaagatatatgtacatactcataggtaaaaaatgttaatgccgtcaatgttcaaaattataaagagaataaataaatacgttaaaaaaaaaaaa

SEQ ID NO: 1902 - protein, 530 aa, Ctenocephalides felis
MDSNTGIQIIASKEPKPRQFEDALALTGFGKFNYLLLVVSGCVLVCVLMETLGMSFVVPSAQCDLELTTKQKGILSAIAFIGIISSSHLWGFLADTRGRRKVIMPTLLLAFFCTLASSFVNSVWLFILLRYFNGFFVSGGSATIYAYLGEFHNPRHRSRAIMGASSIFGFACLALPTVAWLIINQKWSFYIDFLGYTYKPWRLYMVACGLPSLLCCFALWKLPESPKFLMNQGRNEEARQIIAKMYRINTGKPESEFPVSSILDEYPGVDGENTNKTKKSFLRTVWDQTAPLFMGEHMKKTLIACTLQFGIFATSNGMYMWFPDIISKMTEFQNAHPGVPSTICYVVQNSSMLRADDFIDTTNSTTECKDTMEEQAFMHSLMLEAGYAIGFPIIGAIINSVGKLPILVFVMVSCGICGIICAFIEHLTIASYLYLWLLVCGIAVTVVNAALVDLYPTQLRAMAVCISLMMGRLGSVVGSNVVGIILDYNCDLTFLISGTSLIACGVIAFFIPNIYQKQVDRRTSIASYGP

SEQ ID NO: 1903 - DNA, 1875 bp, Ctenocephalides felis
ttttttttttttaacgtatttatttattctctttataattttgaacattgacggcattaacattttttacctatgagtatgtacatatatcttacatcgaatctaataacaataaagagttattaattttcatgtcgatgttttagaaaatgattcagtagcaactctgaattttctttgtaattgataatactttctcaaagtataattgcatttcacaacacacgacggaaatatggttatggtccatatgaagcaatgctcgttcttctatccacttgcttctgataaatgttcggtataaagaatgcaatcactccacatgctatcagagatgttcctgatattaaaaatgttaaatcgcaattataatctagaattattcctacaacattgcttccaacaacacttcctaatcgacccatcattaaagatatacatactgccattgccctgagttgtgtagggtacagatctactaatgccgcgtttaccactgtcacagcaattccgcaaaccagcaaccacaaatataaatatgatgctattgttaaatgttcaataaatgcacaaattattccacaaatcccgcatgagaccatcacgaatacaagaattggaagctttcccacagagttaataatagcacctattatgggaaatccaatcgcatatccagcttccaacattaaagaatgcataaatgcctgttcttccattgtgtctttacactcggtcgtactattcgtagtatcaatgaagtcgtccgccctaagcattgatgaattttggacaacgtagcatattgtacttggtactcctggatgagcgttttgaaattctgtcattttacttatgatatcgggaaaccacatgtacatgccgttagatgtggcaaatattccgaattgcagagtacatgcaatgagtgtttttttcatgtgctcacccataaacagcggagcagtttgatcccatacagttcttaaaaatgatttctttgttttatttgtattttcaccatccactcctggatattcatctaagattgatgatacggggaattcactttctggtttaccagtattaattctatacattttggcaataatttgacgagcttcttcgtttcttccctgattcatcaaaaatttgggactttctggtaatttccacaaagcaaaacaacaaagcagtgatggcaaaccacatgcaaccatatacaacctccagggcttgtatgtatatcccaaaaagtcaatatagaatgaccatttctgatttataattaaccatgcaaccgtcggtaatgcaagacacgcaaatccgaagatgcttgacgctcccataatagccctgctgcgatgcctaggattatgaaattctcctaaatatgcatatattgttgcacttcctccagatacgaaaaatccattgaaatatcgcagcaaaataaacagccaaactgaatttacaaaactagatgccaaggtacaaaaaaatgcaagaagaagtgtaggcataatcactttccgcctccctctcgtatcggctaaaaatccccataaatgtgaactgcttataatacctataaaagctatagcgcttaatattcctttttgttttgttgttaattccagatcacattgtgctgaaggaacgacaaaactcattccaagagtttccatcaaaacacatactaatacgcatccactcacgaccagaagaaggtaattgaattttccaaaacctgtgagtgccaacgcatcttcaaactgccttggttttggttctttggaagctattatttgaatccccgtgttactgtccatatttattaatttccaaactacagattcaattaaaccgttttgt

SEQ ID NO: 1904 - DNA, 1590 bp, Ctenocephalides felis
atggacagtaacacggggattcaaataatagcttccaaagaaccaaaaccaaggcagtttgaagatgcgttggcactcacaggttttggaaaattcaattaccttcttctggtcgtgagtggatgcgtattagtatgtgttttgatggaaactcttggaatgagttttgtcgttccttcagcacaatgtgatctggaattaacaacaaaacaaaaaggaatattaagcgctatagcttttataggtattataagcagttcacatttatggggatttttagccgatacgagagggaggcggaaagtgattatgcctacacttcttcttgcatttttttgtaccttggcatctagttttgtaaattcagtttggctgtttattttgctgcgatatttcaatggatttttcgtatctggaggaagtgcaacaatatatgcatatttaggagaatttcataatcctaggcatcgcagcagggctattatgggagcgtcaagcatcttcggatttgcgtgtcttgcattaccgacggttgcatggttaattataaatcagaaatggtcattctatattgactttttgggatatacatacaagccctggaggttgtatatggttgcatgtggtttgccatcactgctttgttgttttgctttgtggaaattaccagaaagtcccaaatttttgatgaatcagggaagaaacgaagaagctcgtcaaattattgccaaaatgtatagaattaatactggtaaaccagaaagtgaattccccgtatcatcaatcttagatgaatatccaggagtggatggtgaaaatacaaataaaacaaagaaatcatttttaagaactgtatgggatcaaactgctccgctgtttatgggtgagcacatgaaaaaaacactcattgcatgtactctgcaattcggaatatttgccacatctaacggcatgtacatgtggtttcccgatatcataagtaaaatgacagaatttcaaaacgctcatccaggagtaccaagtacaatatgctacgttgtccaaaattcatcaatgcttagggcggacgacttcattgatactacgaatagtacgaccgagtgtaaagacacaatggaagaacaggcatttatgcattctttaatgttggaagctggatatgcgattggatttcccataataggtgctattattaactctgtgggaaagcttccaattcttgtattcgtgatggtctcatgcgggatttgtggaataatttgtgcatttattgaacatttaacaatagcatcatatttatatttgtggttgctggtttgcggaattgctgtgacagtggtaaacgcggcattagtagatctgtaccctacacaactcagggcaatggcagtatgtatatctttaatgatgggtcgattaggaagtgttgttggaagcaatgttgtaggaataattctagattataattgcgatttaacatttttaatatcaggaacatctctgatagcatgtggagtgattgcattctttataccgaacatttatcagaagcaagtggatagaagaacgagcattgcttcatatggacca

SEQ ID NO: 1905 - DNA, 1590 bp, Ctenocephalides felis
tggtccatatgaagcaatgctcgttcttctatccacttgcttctgataaatgttcggtataaagaatgcaatcactccacatgctatcagagatgttcctgatattaaaaatgttaaatcgcaattataatctagaattattcctacaacattgcttccaacaacacttcctaatcgacccatcattaaagatatacatactgccattgccctgagttgtgtagggtacagatctactaatgccgcgtttaccactgtcacagcaattccgcaaaccagcaaccacaaatataaatatgatgctattgttaaatgttcaataaatgcacaaattattccacaaatcccgcatgagaccatcacgaatacaagaattggaagctttcccacagagttaataatagcacctattatgggaaatccaatcgcatatccagcttccaacattaaagaatgcataaatgcctgttcttccattgtgtctttacactcggtcgtactattcgtagtatcaatgaagtcgtccgccctaagcattgatgaattttggacaacgtagcatattgtacttggtactcctggatgagcgttttgaaattctgtcattttacttatgatatcgggaaaccacatgtacatgccgttagatgtggcaaatattccgaattgcagagtacatgcaatgagtgtttttttcatgtgctcacccataaacagcggagcagtttgatcccatacagttcttaaaaatgatttctttgttttatttgtattttcaccatccactcctggatattcatctaagattgatgatacggggaattcactttctggtttaccagtattaattctatacattttggcaataatttgacgagcttcttcgtttcttccctgattcatcaaaaatttgggactttctggtaatttccacaaagcaaaacaacaaagcagtgatggcaaaccacatgcaaccatatacaacctccagggcttgtatgtatatcccaaaaagtcaatatagaatgaccatttctgatttataattaaccatgcaaccgtcggtaatgcaagacacgcaaatccgaagatgcttgacgctcccataatagccctgctgcgatgcctaggattatgaaattctcctaaatatgcatatattgttgcacttcctccagatacgaaaaatccattgaaatatcgcagcaaaataaacagccaaactgaatttacaaaactagatgccaaggtacaaaaaaatgcaagaagaagtgtaggcataatcactttccgcctccctctcgtatcggctaaaaatccccataaatgtgaactgcttataatacctataaaagctatagcgcttaatattcctttttgttttgttgttaattccagatcacattgtgctgaaggaacgacaaaactcattccaagagtttccatcaaaacacatactaatacgcatccactcacgaccagaagaaggtaattgaattttccaaaacctgtgagtgccaacgcatcttcaaactgccttggttttggttctttggaagctattatttgaatccccgtgttactgtccat

SEQ ID NO: 1906 - DNA, 381 bp, Ctenocephalides felis
acgttatatcgtgcccttaatggcagcagctatggcttccaaatgggttggtgatgctttgggcagacagggtatatatgatgcccatatacagcttaatggatatccattcttggacagtaaagatgaatttgcacatacatctttagctgcagatgtcatgcaacccaagaggaatgaaacattaagtgtaatcactcaagactcgatgactgtggatgatgttgaaggtttactgaaagaaactgagcacaatggatatccagttgttgtttccagagaatctcagtatcttgttggatttgttttgaggagggacttaaatctagccatagccaatgctagacgcatgatcgatgggataacaggacaaagtttggt

SEQ ID NO: 1907 - DNA, 381 bp, Ctenocephalides felis
accaaactttgtcctgttatcccatcgatcatgcgtctagcattggctatggctagatttaagtccctcctcaaaacaaatccaacaagatactgagattctctggaaacaacaactggatatccattgtgctcagtttctttcagtaaaccttcaacatcatccacagtcatcgagtcttgagtgattacacttaatgtttcattcctcttgggttgcatgacatctgcagctaaagatgtatgtgcaaattcatctttactgtccaagaatggatatccattaagctgtatatgggcatcatatataccctgtctgcccaaagcatcaccaacccatttggaagccatagctgctgccattaagggcacgatataacgt

SEQ ID NO: 1908 - DNA, 2191 bp, Ctenocephalides felis
atttttgcttctttggcagcctctttggtgcgcatgtttgcaccttatgcttgtgggtcaggtataccagagattaaaaccattctgagtggtttcatcatcagaggatatcttggaaaatggacattgattattaaaagtgtaggaatcatgttgtctgtatcagctggattgagtttgggtaaagaaggtcctatggtacacattgccagctgtataggtaatatattgtcttatttatttcctaaatatggtcggaatgaagcaaagaaacgagagattttatcagcagctgcagcagctggtgtatctgttgcatttggagcacctattggaggtgtgcttttcagtttggaagaggtgagctactatttcccattgaagaccttatggagatcattcttctgtgctttgatagcagctttcatattgcgatccataaatccatttggaaatgagcactctgtccttttctatgtggaatacaataaaccttggatattttttgaactgatacctttcataggccttggaataattggtggtgttgtagcaacgctgtttataaaagctaatttgtactggtgtcgctaccgtaaattttctaaactaggacagtaccccgttgcagaagttttagttgttgctgttgcaacagcagtgattgcttatcctaatccttacaccaggatgaatactagtcaactgatttatttactattcagccaatgcgggatttccaattctgatcctttgtgtgattacaatcgcaatttcactgatgttaaatcagctatagaaatagcagcagctggtcctggtgtctaccaggctgtgtggttgctcctgattgctttggtactgaaattgggaatgactgtatttacctttggtatgaaagtaccatgtggtctgtttatcccaagtttatgcctaggagctattatgggtagaattgtgggcattggaattgaacaattggcttactattatccaaaattatggttcttttctggtgaatgctcaactggagacaattgcatcacaccgggcctgtatgctatggtgggcgctgcagctgttttaggtggtgtcactagaatgacagtttctctggtggtaataatgtttgaactgactggtggtgtacgttatatcgtgcccttaatggcagcagctatggcttccaaatgggttggtgatgctttgggcagacagggtatatatgatgcccatatacagcttaatggatatccattcttggacagtaaagatgaatttgcacatacatctttagctgcagatgtcatgcaacccaagaggaatgaaacattaagtgtaatcactcaagactcgatgactgtggatgatgttgaaggtttactgaaagaaactgagcacaatggatatccagttgttgtttccagagaatctcagtatcttgttggatttgttttgaggagggacttaaatctagccatagccaatgctagacgcatgatcgatgggataacaggacaaagtttggtacttttcataaatggccctacagtgcaaagtttaggacctccacctttgaaactaaagaaaatattagatatggctccaataacagtgactgatcaaacaccaatggaaactgtggtggatatgtttagaaaactaggtttacgtcagacattagtcacacacaatgggcgtttgctcggtgttataactaaaaaagatgttttacgacatgtaaaacaaatggataatgaagatcctaatagtatactttttaattaatatttacatatatgtattaaataataaatgttaagttgcataaaaatccataaaactatgtaggtgtacattttaatggctattcttcatatacctaaatgaaaagactaaaaagaaaccaatttttaaaatatttaggtatttgatataatacatatttattttaatatgaatagtattttgtgtaatttaattgaaggcatcacaaattaaattgtgtaattgttataacagaatcagagtgtatatattagatttatcgattcgaaatttgtacaaaatgtatctcagttttttttaatgaggacttagaaaattttattgttaattgattatttttttagtattattttagtatttgtaactgattattaaacgattgattataaaaaaaaaaaaaaaa

SEQ ID NO: 1909 - DNA, 2191 bp, Ctenocephalides felis
ttttttttttttttttataatcaatcgtttaataatcagttacaaatactaaaataatactaaaaaaataatcaattaacaataaaattttctaagtcctcattaaaaaaaactgagatacattttgtacaaatttcgaatcgataaatctaatatatacactctgattctgttataacaattacacaatttaatttgtgatgccttcaattaaattacacaaaatactattcatattaaaataaatatgtattatatcaaatacctaaatattttaaaaattggtttctttttagtcttttcatttaggtatatgaagaatagccattaaaatgtacacctacatagttttatggatttttatgcaacttaacatttattatttaatacatatatgtaaatattaattaaaaagtatactattaggatcttcattatccatttgttttacatgtcgtaaaacatcttttttagttataacaccgagcaaacgcccattgtgtgtgactaatgtctgacgtaaacctagttttctaaacatatccaccacagtttccattggtgtttgatcagtcactgttattggagccatatctaatattttctttagtttcaaaggtggaggtcctaaactttgcactgtagggccatttatgaaaagtaccaaactttgtcctgttatcccatcgatcatgcgtctagcattggctatggctagatttaagtccctcctcaaaacaaatccaacaagatactgagattctctggaaacaacaactggatatccattgtgctcagtttctttcagtaaaccttcaacatcatccacagtcatcgagtcttgagtgattacacttaatgtttcattcctcttgggttgcatgacatctgcagctaaagatgtatgtgcaaattcatctttactgtccaagaatggatatccattaagctgtatatgggcatcatatataccctgtctgcccaaagcatcaccaacccatttggaagccatagctgctgccattaagggcacgatataacgtacaccaccagtcagttcaaacattattaccaccagagaaactgtcattctagtgacaccacctaaaacagctgcagcgcccaccatagcatacaggcccggtgtgatgcaattgtctccagttgagcattcaccagaaaagaaccataattttggataatagtaagccaattgttcaattccaatgcccacaattctacccataatagctcctaggcataaacttgggataaacagaccacatggtactttcataccaaaggtaaatacagtcattcccaatttcagtaccaaagcaatcaggagcaaccacacagcctggtagacaccaggaccagctgctgctatttctatagctgatttaacatcagtgaaattgcgattgtaatcacacaaaggatcagaattggaaatcccgcattggctgaatagtaaataaatcagttgactagtattcatcctggtgtaaggattaggataagcaatcactgctgttgcaacagcaacaactaaaacttctgcaacggggtactgtcctagtttagaaaatttacggtagcgacaccagtacaaattagcttttataaacagcgttgctacaacaccaccaattattccaaggcctatgaaaggtatcagttcaaaaaatatccaaggtttattgtattccacatagaaaaggacagagtgctcatttccaaatggatttatggatcgcaatatgaaagctgctatcaaagcacagaagaatgatctccataaggtcttcaatgggaaatagtagctcacctcttccaaactgaaaagcacacctccaataggtgctccaaatgcaacagatacaccagctgctgcagctgctgataaaatctctcgtttctttgcttcattccgaccatatttaggaaataaataagacaatatattacctatacagctggcaatgtgtaccataggaccttctttacccaaactcaatccagctgatacagacaacatgattcctacacttttaataatcaatgtccattttccaagatatcctctgatgatgaaaccactcagaatggttttaatctctggtatacctgacccacaagcataaggtgcaaacatgcgcaccaaagaggctgccaaagaagcaaaaat

SEQ ID NO: 1910 - DNA, 1968 bp, Ctenocephalides felis
gtggtggcatatcatttgctggtatgcaagctgaaagcgatgatattcctgggattgggcaatatgatgatttccatacgatagattggcaacgtgatatagccagagatcgaatgagacatcgatatattgttaaaaaacgacaagactctatactagacctgataaagggtgcccatgatgcctggtcaggttgggtgtgtgttctcctagtcgggctggtgacaggagctattgcaggcgtcatagatatcggagcaagttggatgacggatttaaagaacggtgtttgcccacaagcattctggttgaatagagaacaatgttgttggtcattgaatgaaacaacctttgatgatggaaattgctcacaatggctgacttggcctgaggttttcggacaacctagaactggggcgggggcttacataattgcttatttgttttatattatttgggcattgatttttgcttctttggcagcctctttggtgcgcatgtttgcaccttatgcttgtgggtcaggtataccagagattaaaaccattctgagtggtttcatcatcagaggatatcttggaaaatggacattgattattaaaagtgtaggaatcatgttgtctgtatcagctggattgagtttgggtaaagaaggtcctatggtacacattgccagctgtataggtaatatattgtcttatttatttcctaaatatggtcggaatgaagcaaagaaacgagagattttatcagcagctgcagcagctggtgtatctgttgcatttggagcacctattggaggtgtgcttttcagtttggaagaggtgagctactatttcccattgaagaccttatggagatcattcttctgtgctttgatagcagctttcatattgcgatccataaatccatttggaaatgagcactctgtccttttctatgtggaatacaataaaccttggatattttttgaactgatacctttcataggccttggaataattggtggtgttgtagcaacgctgtttataaaagctaatttgtactggtgtcgctaccgtaaattttctaaactaggacagtaccccgttgcagaagttttagttgttgctgttgcaacagcagtgattgcttatcctaatccttacaccaggatgaatactagtcaactgatttatttactattcagccaatgcgggatttccaattctgatcctttgtgtgattacaatcgcaatttcactgatgttaaatcagctatagaaatagcagcagctggtcctggtgtctaccaggctgtgtggttgctcctgattgctttggtactgaaattgggaatgactgtatttacctttggtatgaaagtaccatgtggtctgtttatcccaagtttatgcctaggagctattatgggtagaattgtgggcattggaattgaacaattggcttactattatccaaaattatggttcttttctggtgaatgctcaactggagacaattgcatcacaccgggcctgtatgctatggtgggcgctgcagctgttttaggtggtgtcactagaatgacagtttctctggtggtaataatgtttgaactgactggtggtgtacgttatatcgtgcccttaatggcagcagctatggcttccaaatgggttggtgatgctttgggcagacagggtatatatgatgcccatatacagcttaatggatatccattcttggacagtaaagatgaatttgcacatacatctttagctgcagatgtcatgcaacccaagaggaatgaaacattaagtgtaatcactcaagactcgatgactgtggatgatgttgaaggtttactgaaagaaactgagcacaatggatatccagttgttgtttccagagaatctcagtatcttgttggatttgttttgaggagggacttaaatctagccatagccaatgctagacgcatgatcg

SEQ ID NO: 1911 - DNA, 1968 bp, Ctenocephalides felis
cgatcatgcgtctagcattggctatggctagatttaagtccctcctcaaaacaaatccaacaagatactgagattctctggaaacaacaactggatatccattgtgctcagtttctttcagtaaaccttcaacatcatccacagtcatcgagtcttgagtgattacacttaatgtttcattcctcttgggttgcatgacatctgcagctaaagatgtatgtgcaaattcatctttactgtccaagaatggatatccattaagctgtatatgggcatcatatataccctgtctgcccaaagcatcaccaacccatttggaagccatagctgctgccattaagggcacgatataacgtacaccaccagtcagttcaaacattattaccaccagagaaactgtcattctagtgacaccacctaaaacagctgcagcgcccaccatagcatacaggcccggtgtgatgcaattgtctccagttgagcattcaccagaaaagaaccataattttggataatagtaagccaattgttcaattccaatgcccacaattctacccataatagctcctaggcataaacttgggataaacagaccacatggtactttcataccaaaggtaaatacagtcattcccaatttcagtaccaaagcaatcaggagcaaccacacagcctggtagacaccaggaccagctgctgctatttctatagctgatttaacatcagtgaaattgcgattgtaatcacacaaaggatcagaattggaaatcccgcattggctgaatagtaaataaatcagttgactagtattcatcctggtgtaaggattaggataagcaatcactgctgttgcaacagcaacaactaaaacttctgcaacggggtactgtcctagtttagaaaatttacggtagcgacaccagtacaaattagcttttataaacagcgttgctacaacaccaccaattattccaaggcctatgaaaggtatcagttcaaaaaatatccaaggtttattgtattccacatagaaaaggacagagtgctcatttccaaatggatttatggatcgcaatatgaaagctgctatcaaagcacagaagaatgatctccataaggtcttcaatgggaaatagtagctcacctcttccaaactgaaaagcacacctccaataggtgctccaaatgcaacagatacaccagctgctgcagctgctgataaaatctctcgtttctttgcttcattccgaccatatttaggaaataaataagacaatatattacctatacagctggcaatgtgtaccataggaccttctttacccaaactcaatccagctgatacagacaacatgattcctacacttttaataatcaatgtccattttccaagatatcctctgatgatgaaaccactcagaatggttttaatctctggtatacctgacccacaagcataaggtgcaaacatgcgcaccaaagaggctgccaaagaagcaaaaatcaatgcccaaataatataaaacaaataagcaattatgtaagcccccgccccagttctaggttgtccgaaaacctcaggccaagtcagccattgtgagcaatttccatcatcaaaggttgtttcattcaatgaccaacaacattgttctctattcaaccagaatgcttgtgggcaaacaccgttctttaaatccgtcatccaacttgctccgatatctatgacgcctgcaatagctcctgtcaccagcccgactaggagaacacacacccaacctgaccaggcatcatgggcaccctttatcaggtctagtatagagtcttgtcgttttttaacaatatatcgatgtctcattcgatctctggctatatcacgttgccaatctatcgtatggaaatcatcatattgcccaatcccaggaatatcatcgctttcagcttgcataccagcaaatgatatgccaccac

SEQ ID NO: 1912 - DNA, 673 bp, Ctenocephalides felis
  misc_feature (66)..(66): n = unknown
tactcactatatggctcgagcggccgcccgggcagtcgtttttgttagaaaaagtacaaaaattanttaatgtaacagtgcttgtgatataaaaaataatgattcaagtgcatcatatttaaatcaattaatttttttaaaatcttagaaatgaatttaaagcagctatggagaaatatccattaaaaggaaattctacgatacgtttaagtggtcctgcttcttatcaatcggttactaaaaaaaaacgcccaggagactccactaatcacatagtggaacgagtggatcatcctttgagcggcacgatgccctcggacggaccccaacagcataatccagtgtcggactcgggcgatttttcgccagacgaattcggcaaacgtatatttcctcccggatccacacagttgaccctggatgatgataatggatcagcaaatttggcaattaaatttgagggtctttctagtggtggcatatcatttgctggtatgcaagctgaaagcgatgatattcctgggattgggcaatatgatgatttccatacgatagattggcaacgtgatatagccagagatcgaatgagacatcgatatattgttaaaaaacgacaagactctatactagacctgataaagggtgcccatgatgcctggtcaggttgggtgtg

SEQ ID NO: 1913 - DNA, 673 bp, Ctenocephalides felis
  misc_feature (608)..(608): n = unknown
cacacccaacctgaccaggcatcatgggcaccctttatcaggtctagtatagagtcttgtcgttttttaacaatatatcgatgtctcattcgatctctggctatatcacgttgccaatctatcgtatggaaatcatcatattgcccaatcccaggaatatcatcgctttcagcttgcataccagcaaatgatatgccaccactagaaagaccctcaaatttaattgccaaatttgctgatccattatcatcatccagggtcaactgtgtggatccgggaggaaatatacgtttgccgaattcgtctggcgaaaaatcgcccgagtccgacactggattatgctgttggggtccgtccgagggcatcgtgccgctcaaaggatgatccactcgttccactatgtgattagtggagtctcctgggcgtttttttttagtaaccgattgataagaagcaggaccacttaaacgtatcgtagaatttccttttaatggatatttctccatagctgctttaaattcatttctaagattttaaaaaaattaattgatttaaatatgatgcacttgaatcattattttttatatcacaagcactgttacattaantaatttttgtactttttctaacaaaaacgactgcccgggcggccgctcgagccatatagtgagta

SEQ ID NO: 1914 - DNA, 3126 bp, Ctenocephalides felis
  misc_feature (66)..(66): n = unknown
  CDS (168)..(2720)
tactcactatatggctcgagcggccgcccgggcagtcgtttttgttagaaaaagtacaaaaattanttaatgtaacagtgcttgtgatataaaaaataatgattcaagtgcatcatatttaaatcaattaatttttttaaaatcttagaaatgaatttaaagcagctatggagaaatatccattaaaaggaaattctacgatacgtttaagtggtcctgcttcttatcaatcggttactaaaaaaaaacgcccaggagactccactaatcacatagtggaacgagtggatcatcctttgagcggcacgatgccctcggacggaccccaacagcataatccagtgtcggactcgggcgatttttcgccagacgaattcggcaaacgtatatttcctcccggatccacacagttgaccctggatgatgataatggatcagcaaatttggcaattaaatttgagggtctttctagtggtggcatatcatttgctggtatgcaagctgaaagcgatgatattcctgggattgggcaatatgatgatttccatacgatagattggcaacgtgatatagccagagatcgaatgagacatcgatatattgttaaaaaacgacaagactctatactagacctgataaagggtgcccatgatgcctggtcaggttgggtgtgtgttctcctagtcgggctggtgacaggagctattgcaggcgtcatagatatcggagcaagttggatgacggatttaaagaacggtgtttgcccacaagcattctggttgaatagagaacaatgttgttggtcattgaatgaaacaacctttgatgatggaaattgctcacaatggctgacttggcctgaggttttcggacaacctagaactggggcgggggcttacataattgcttatttgttttatattatttgggcattgatttttgcttctttggcagcctctttggtgcgcatgtttgcaccttatgcttgtgggtcaggtataccagagattaaaaccattctgagtggtttcatcatcagaggatatcttggaaaatggacattgattattaaaagtgtaggaatcatgttgtctgtatcagctggattgagtttgggtaaagaaggtcctatggtacacattgccagctgtataggtaatatattgtcttatttatttcctaaatatggtcggaatgaagcaaagaaacgagagattttatcagcagctgcagcagctggtgtatctgttgcatttggagcacctattggaggtgtgcttttcagtttggaagaggtgagctactatttcccattgaagaccttatggagatcattcttctgtgctttgatagcagctttcatattgcgatccataaatccatttggaaatgagcactctgtccttttctatgtggaatacaataaaccttggatattttttgaactgatacctttcataggccttggaataattggtggtgttgtagcaacgctgtttataaaagctaatttgtactggtgtcgctaccgtaaattttctaaactaggacagtaccccgttgcagaagttttagttgttgctgttgcaacagcagtgattgcttatcctaatccttacaccaggatgaatactagtcaactgatttatttactattcagccaatgcgggatttccaattctgatcctttgtgtgattacaatcgcaatttcactgatgttaaatcagctatagaaatagcagcagctggtcctggtgtctaccaggctgtgtggttgctcctgattgctttggtactgaaattgggaatgactgtatttacctttggtatgaaagtaccatgtggtctgtttatcccaagtttatgcctaggagctattatgggtagaattgtgggcattggaattgaacaattggcttactattatccaaaattatggttcttttctggtgaatgctcaactggagacaattgcatcacaccgggcctgtatgctatggtgggcgctgcagctgttttaggtggtgtcactagaatgacagtttctctggtggtaataatgtttgaactgactggtggtgtacgttatatcgtgcccttaatggcagcagctatggcttccaaatgggttggtgatgctttgggcagacagggtatatatgatgcccatatacagcttaatggatatccattcttggacagtaaagatgaatttgcacatacatctttagctgcagatgtcatgcaacccaagaggaatgaaacattaagtgtaatcactcaagactcgatgactgtggatgatgttgaaggtttactgaaagaaactgagcacaatggatatccagttgttgtttccagagaatctcagtatcttgttggatttgttttgaggagggacttaaatctagccatagccaatgctagacgcatgatcgatgggataacaggacaaagtttggtacttttcataaatggccctacagtgcaaagtttaggacctccacctttgaaactaaagaaaatattagatatggctccaataacagtgactgatcaaacaccaatggaaactgtggtggatatgtttagaaaactaggtttacgtcagacattagtcacacacaatgggcgtttgctcggtgttataactaaaaaagatgttttacgacatgtaaaacaaatggataatgaagatcctaatagtatactttttaattaatatttacatatatgtattaaataataaatgttaagttgcataaaaatccataaaactatgtaggtgtacattttaatggctattcttcatatacctaaatgaaaagactaaaaagaaaccaatttttaaaatatttaggtatttgatataatacatatttattttaatatgaatagtattttgtgtaatttaattgaaggcatcacaaattaaattgtgtaattgttataacagaatcagagtgtatatattagatttatcgattcgaaatttgtacaaaatgtatctcagttttttttaatgaggacttagaaaattttattgttaattgattatttttttagtattattttagtatttgtaactgattattaaacgattgattataaaaaaaaaaaaaaaa

SEQ ID NO: 1915 - protein, 851 aa, Ctenocephalides felis
MEKYPLKGNSTIRLSGPASYQSVTKKKRPGDSTNHIVERVDHPLSGTMPSDGPQQHNPVSDSGDFSPDEFGKRIFPPGSTQLTLDDDNGSANLAIKFEGLSSGGISFAGMQAESDDIPGIGQYDDFHTIDWQRDIARDRMRHRYIVKKRQDSILDLIKGAHDAWSGWVCVLLVGLVTGAIAGVIDIGASWMTDLKNGVCPQAFWLNREQCCWSLNETTFDDGNCSQWLTWPEVFGQPRTGAGAYIIAYLFYIIWALIFASLAASLVRMFAPYACGSGIPEIKTILSGFIIRGYLGKWTLIIKSVGIMLSVSAGLSLGKEGPMVHIASCIGNILSYLFPKYGRNEAKKREILSAAAAAGVSVAFGAPIGGVLFSLEEVSYYFPLKTLWRSFFCALIAAFILRSINPFGNEHSVLFYVEYNKPWIFFELIPFIGLGIIGGVVATLFIKANLYWCRYRKFSKLGQYPVAEVLVVAVATAVIAYPNPYTRMNTSQLIYLLFSQCGISNSDPLCDYNRNFTDVKSAIEIAAAGPGVYQAVWLLLIALVLKLGMTVFTFGMKVPCGLFIPSLCLGAIMGRIVGIGIEQLAYYYPKLWFFSGECSTGDNCITPGLYAMVGAAAVLGGVTRMTVSLVVIMFELTGGVRYIVPLMAAAMASKWVGDALGRQGIYDAHIQLNGYPFLDSKDEFAHTSLAADVMQPKRNETLSVITQDSMTVDDVEGLLKETEHNGYPVVVSRESQYLVGFVLRRDLNLAIANARRMIDGITGQSLVLFINGPTVQSLGPPPLKLKKILDMAPITVTDQTPMETVVDMFRKLGLRQTLVTHNGRLLGVITKKDVLRHVKQMDNEDPNSILFN

SEQ ID NO: 1916 - DNA, 3126 bp, Ctenocephalides felis; identical to SEQ ID NO: 1914
  misc_feature (66)..(66): n = unknown

SEQ ID NO: 1917 - DNA, 2553 bp, Ctenocephalides felis
atggagaaatatccattaaaaggaaattctacgatacgtttaagtggtcctgcttcttatcaatcggttactaaaaaaaaacgcccaggagactccactaatcacatagtggaacgagtggatcatcctttgagcggcacgatgccctcggacggaccccaacagcataatccagtgtcggactcgggcgatttttcgccagacgaattcggcaaacgtatatttcctcccggatccacacagttgaccctggatgatgataatggatcagcaaatttggcaattaaatttgagggtctttctagtggtggcatatcatttgctggtatgcaagctgaaagcgatgatattcctgggattgggcaatatgatgatttccatacgatagattggcaacgtgatatagccagagatcgaatgagacatcgatatattgttaaaaaacgacaagactctatactagacctgataaagggtgcccatgatgcctggtcaggttgggtgtgtgttctcctagtcgggctggtgacaggagctattgcaggcgtcatagatatcggagcaagttggatgacggatttaaagaacggtgtttgcccacaagcattctggttgaatagagaacaatgttgttggtcattgaatgaaacaacctttgatgatggaaattgctcacaatggctgacttggcctgaggttttcggacaacctagaactggggcgggggcttacataattgcttatttgttttatattatttgggcattgatttttgcttctttggcagcctctttggtgcgcatgtttgcaccttatgcttgtgggtcaggtataccagagattaaaaccattctgagtggtttcatcatcagaggatatcttggaaaatggacattgattattaaaagtgtaggaatcatgttgtctgtatcagctggattgagtttgggtaaagaaggtcctatggtacacattgccagctgtataggtaatatattgtcttatttatttcctaaatatggtcggaatgaagcaaagaaacgagagattttatcagcagctgcagcagctggtgtatctgttgcatttggagcacctattggaggtgtgcttttcagtttggaagaggtgagctactatttcccattgaagaccttatggagatcattcttctgtgctttgatagcagctttcatattgcgatccataaatccatttggaaatgagcactctgtccttttctatgtggaatacaataaaccttggatattttttgaactgatacctttcataggccttggaataattggtggtgttgtagcaacgctgtttataaaagctaatttgtactggtgtcgctaccgtaaattttctaaactaggacagtaccccgttgcagaagttttagttgttgctgttgcaacagcagtgattgcttatcctaatccttacaccaggatgaatactagtcaactgatttatttactattcagccaatgcgggatttccaattctgatcctttgtgtgattacaatcgcaatttcactgatgttaaatcagctatagaaatagcagcagctggtcctggtgtctaccaggctgtgtggttgctcctgattgctttggtactgaaattgggaatgactgtatttacctttggtatgaaagtaccatgtggtctgtttatcccaagtttatgcctaggagctattatgggtagaattgtgggcattggaattgaacaattggcttactattatccaaaattatggttcttttctggtgaatgctcaactggagacaattgcatcacaccgggcctgtatgctatggtgggcgctgcagctgttttaggtggtgtcactagaatgacagtttctctggtggtaataatgtttgaactgactggtggtgtacgttatatcgtgcccttaatggcagcagctatggcttccaaatgggttggtgatgctttgggcagacagggtatatatgatgcccatatacagcttaatggatatccattcttggacagtaaagatgaatttgcacatacatctttagctgcagatgtcatgcaacccaagaggaatgaaacattaagtgtaatcactcaagactcgatgactgtggatgatgttgaaggtttactgaaagaaactgagcacaatggatatccagttgttgtttccagagaatctcagtatcttgttggatttgttttgaggagggacttaaatctagccatagccaatgctagacgcatgatcgatgggataacaggacaaagtttggtacttttcataaatggccctacagtgcaaagtttaggacctccacctttgaaactaaagaaaatattagatatggctccaataacagtgactgatcaaacaccaatggaaactgtggtggatatgtttagaaaactaggtttacgtcagacattagtcacacacaatgggcgtttgctcggtgttataactaaaaaagatgttttacgacatgtaaaacaaatggataatgaagatcctaatagtatactttttaat

SEQ ID NO: 1918 - DNA, 2553 bp, Ctenocephalides felis
attaaaaagtatactattaggatcttcattatccatttgttttacatgtcgtaaaacatcttttttagttataacaccgagcaaacgcccattgtgtgtgactaatgtctgacgtaaacctagttttctaaacatatccaccacagtttccattggtgtttgatcagtcactgttattggagccatatctaatattttctttagtttcaaaggtggaggtcctaaactttgcactgtagggccatttatgaaaagtaccaaactttgtcctgttatcccatcgatcatgcgtctagcattggctatggctagatttaagtccctcctcaaaacaaatccaacaagatactgagattctctggaaacaacaactggatatccattgtgctcagtttctttcagtaaaccttcaacatcatccacagtcatcgagtcttgagtgattacacttaatgtttcattcctcttgggttgcatgacatctgcagctaaagatgtatgtgcaaattcatctttactgtccaagaatggatatccattaagctgtatatgggcatcatatataccctgtctgcccaaagcatcaccaacccatttggaagccatagctgctgccattaagggcacgatataacgtacaccaccagtcagttcaaacattattaccaccagagaaactgtcattctagtgacaccacctaaaacagctgcagcgcccaccatagcatacaggcccggtgtgatgcaattgtctccagttgagcattcaccagaaaagaaccataattttggataatagtaagccaattgttcaattccaatgcccacaattctacccataatagctcctaggcataaacttgggataaacagaccacatggtactttcataccaaaggtaaatacagtcattcccaatttcagtaccaaagcaatcaggagcaaccacacagcctggtagacaccaggaccagctgctgctatttctatagctgatttaacatcagtgaaattgcgattgtaatcacacaaaggatcagaattggaaatcccgcattggctgaatagtaaataaatcagttgactagtattcatcctggtgtaaggattaggataagcaatcactgctgttgcaacagcaacaactaaaacttctgcaacggggtactgtcctagtttagaaaatttacggtagcgacaccagtacaaattagcttttataaacagcgttgctacaacaccaccaattattccaaggcctatgaaaggtatcagttcaaaaaatatccaaggtttattgtattccacatagaaaaggacagagtgctcatttccaaatggatttatggatcgcaatatgaaagctgctatcaaagcacagaagaatgatctccataaggtcttcaatgggaaatagtagctcacctcttccaaactgaaaagcacacctccaataggtgctccaaatgcaacagatacaccagctgctgcagctgctgataaaatctctcgtttctttgcttcattccgaccatatttaggaaataaataagacaatatattacctatacagctggcaatgtgtaccataggaccttctttacccaaactcaatccagctgatacagacaacatgattcctacacttttaataatcaatgtccattttccaagatatcctctgatgatgaaaccactcagaatggttttaatctctggtatacctgacccacaagcataaggtgcaaacatgcgcaccaaagaggctgccaaagaagcaaaaatcaatgcccaaataatataaaacaaataagcaattatgtaagcccccgccccagttctaggttgtccgaaaacctcaggccaagtcagccattgtgagcaatttccatcatcaaaggttgtttcattcaatgaccaacaacattgttctctattcaaccagaatgcttgtgggcaaacaccgttctttaaatccgtcatccaacttgctccgatatctatgacgcctgcaatagctcctgtcaccagcccgactaggagaacacacacccaacctgaccaggcatcatgggcaccctttatcaggtctagtatagagtcttgtcgttttttaacaatatatcgatgtctcattcgatctctggctatatcacgttgccaatctatcgtatggaaatcatcatattgcccaatcccaggaatatcatcgctttcagcttgcataccagcaaatgatatgccaccactagaaagaccctcaaatttaattgccaaatttgctgatccattatcatcatccagggtcaactgtgtggatccgggaggaaatatacgtttgccgaattcgtctggcgaaaaatcgcccgagtccgacactggattatgctgttggggtccgtccgagggcatcgtgccgctcaaaggatgatccactcgttccactatgtgattagtggagtctcctgggcgtttttttttagtaaccgattgataagaagcaggaccacttaaacgtatcgtagaatttccttttaatggatatttctccat

SEQ ID NO: 1919 - DNA, 1181 bp, Ctenocephalides canis
  CDS (127)..(432)
acatcacagaccgtcgacatataaacacaaccgaaatctcctatcacagtgtacggagtgtaaaatattgttgaagtattttgaaatttattaatttattcgaaaaggagatttcattaaataaaaatggtttacgaaagtgacttttacacgacccgtcggccctacagtcgtccggctttgtcttcatactccgtaacgacgccgtcccgtcattacgtggtgactgacactccatctagaccaagggtagcggaagagcaatattcttactcctaccgcagccagcaggaaagatcttctgcagatccctacggcaggaactattcgacaacctccaccaccgaaagcacaagacgtgcagggggttatccaggatctgactattcttacacgagcgaacgctcatccaagaactggagatggaccaggtagttacagatccagctatagctccactacttctggacgtcttcctggaggaaccacttaccgtcacttctcataccgtgtgtaaacacgaaaattgaaaaattttgttttgataaattggtttttatttgaagtctcataagaactaaaagaattttttttataatttttatttttttgctatgaattattattactattatagcactcatattaatatcctgaaaatgtaaaacaaaactatgatttctgatcaaacaaccaattttatcatcactgatttttatcatatcctaggatgatgtaatattgtagtccttggaaagttataccagaagaagactcaatatgctattctgtgtaattattaatataacttaatattatttttatttatttaattaattagcaatgtctactaaaaattgtctaaaattagcttttaattttccctagatatattatcataaaaaccaaagattaggcatatttttgatactgtacaaattttcttgtgatataagtttacaatttgttttaatttttgttgaaacaaaatacgtaatggtattgcaattaataattatagatactaatagtgatgttgtaagagttaggactaatagatgagtcttcttcaattttgataaacatatttttataatctgtgttaaattttgcacttgtaatgctgtgctttttaatgaataaacatgcaatattaaaacttcaaaaaaaaaaaaaaaaaa

SEQ ID NO: 1920 - protein, 102 aa, Ctenocephalides canis
MVYESDFYTTRRPYSRPALSSYSVTTPSRHYVVTDTPSRPRVAEEQYSYSYRSQQERSSADPYGRNYSTTSTTESTRRAGGYPGSDYSYTSERSSKNWRWTR

SEQ ID NO: 1921 - DNA, 1181 bp, Ctenocephalides felis
ttttttttttttttttttgaagttttaatattgcatgtttattcattaaaaagcacagcattacaagtgcaaaatttaacacagattataaaaatatgtttatcaaaattgaagaagactcatctattagtcctaactcttacaacatcactattagtatctataattattaattgcaataccattacgtattttgtttcaacaaaaattaaaacaaattgtaaacttatatcacaagaaaatttgtacagtatcaaaaatatgcctaatctttggtttttatgataatatatctagggaaaattaaaagctaattttagacaatttttagtagacattgctaattaattaaataaataaaaataatattaagttatattaataattacacagaatagcatattgagtcttcttctggtataactttccaaggactacaatattacatcatcctaggatatgataaaaatcagtgatgataaaattggttgtttgatcagaaatcatagttttgttttacattttcaggatattaatatgagtgctataatagtaataataattcatagcaaaaaaataaaaattataaaaaaaattcttttagttcttatgagacttcaaataaaaaccaatttatcaaaacaaaatttttcaattttcgtgtttacacacggtatgagaagtgacggtaagtggttcctccaggaagacgtccagaagtagtggagctatagctggatctgtaactacctggtccatctccagttcttggatgagcgttcgctcgtgtaagaatagtcagatcctggataaccccctgcacgtcttgtgctttcggtggtggaggttgtcgaatagttcctgccgtagggatctgcagaagatctttcctgctggctgcggtaggagtaagaatattgctcttccgctacccttggtctagatggagtgtcagtcaccacgtaatgacgggacggcgtcgttacggagtatgaagacaaagccggacgactgtagggccgacgggtcgtgtaaaagtcactttcgtaaaccatttttatttaatgaaatctccttttcgaataaattaataaatttcaaaatacttcaacaatattttacactccgtacactgtgataggagatttcggttgtgtttatatgtcgacggtctgtgatgt

SEQ ID NO: 1922 - DNA, 306 bp, Ctenocephalides felis
atggtttacgaaagtgacttttacacgacccgtcggccctacagtcgtccggctttgtcttcatactccgtaacgacgccgtcccgtcattacgtggtgactgacactccatctagaccaagggtagcggaagagcaatattcttactcctaccgcagccagcaggaaagatcttctgcagatccctacggcaggaactattcgacaacctccaccaccgaaagcacaagacgtgcagggggttatccaggatctgactattcttacacgagcgaacgctcatccaagaactggagatggaccagg

SEQ ID NO: 1923 - DNA, 306 bp, Ctenocephalides felis
cctggtccatctccagttcttggatgagcgttcgctcgtgtaagaatagtcagatcctggataaccccctgcacgtcttgtgctttcggtggtggaggttgtcgaatagttcctgccgtagggatctgcagaagatctttcctgctggctgcggtaggagtaagaatattgctcttccgctacccttggtctagatggagtgtcagtcaccacgtaatgacgggacggcgtcgttacggagtatgaagacaaagccggacgactgtagggccgacgggtcgtgtaaaagtcactttcgtaaaccat

SEQ ID NO: 1924 - DNA, 2161 bp, Ctenocephalides felis
  CDS (107)..(907)
  misc_feature (1574)..(1574): n = unknown
  misc_feature (1577)..(1577): n = unknown
ggcaccaggtgagtacttgtactctaacaccgtgccaaagcctcaaacacactcgcctgcgctgggagttagtacacagtgatctccactggcaagcgattacacgatgactttcggaatttcagtaattctgttagtgtctatttggacaacaaatactcatgcatatttaacatcagtgcaagaattagacgatgccataagagcagtggtgtcacggatgcatcgagtagccgatattgaaagtggtggcgaatactcagatctgggagtagacttcccagtacccgcaattccacgatctcaaaaagctctagaatcggattcggaatatgattccatattcgatgaaggccagttacatcctagcctcagagatcaggaatatctccagcatagtcctctatggggtcagcagtacgtaagtggaggcgctggtgaaggccaacaaaggctcaaaccagatggaagtgcaatgaatcatcagcaagtaaaaacggataatctgcccgcttattgtaatccacctaatccctgtcctgttggattaacagaagagcatggttgcaccgagaacttcgagaacaccgcagccttcagccgcgactaccaggcggctcagcaatgcatgtgcgacggtgagcatatgttccgttgtccgtcctcattagacggagacgaactggacgactcatccgaatcagacgaacaggacgaacaccaggaccttctggacatggaaggcggacttgatactcgaactgcgcctgaaatcttcatggcgcaaagggagtaccgacgatctggcttgagtgggaataaacatcataaaagaaagagtactaatccctacttgcatggtgagaaactcccagtggctgctaagaagggtatcaacgttgtctactgaaccaatttaaaacgctcaccactaatttaacaaaatatatttttatttttttggataaaccaacccagaaacaaatgctaattaattttcagaaaaaagcatttgtaaacgactttggcaattgataaacggaataatgatttcaaaccgaataaacaaaagaaaaatctacaaaaataatttagttttcgttagtcattacatatgtattaccggttaaaaccctttattcgaaggagaattaagaactaataaaacaatgtttaatattaagtagccgtgtaacttactttgtgtaatattaaagaggcccattatataataattaaatttaatgtagtaaactatttataatatattaatattataaatacatcattaaaacatcaaattactaatgaaatctaatacaatgctattggaatccgattggggtatgatcaaatttcttattgtctttctctctattatttatttgcaagtttgttccgtaccccaggacgatttcaaatatagtctccatcaatgcgcgcatttgcgaaattaaaaaaagctcacaaaaatttaataaagtctcaattacatcccgagacaaatttgaaaaaggaagagttgcattaacaacaattcacattagaaaagaattgattggraaacttacacntgntttcggtgaacgtgtttcagaccccattgatgctcttgtatccgtgcaatgttcatttataatttccataatttaatatattatgaaaccattgtaatgtattgtattatccgatttttgtaatagacattacacgcaatgagtgcacgatacgtgtttaatgaaataagtgtatgttttaagatttgcattcactatttgacatagatataagtaattatatttatcaagcaaatcacttcgtatcatttctattatggatatataataatgatatactaatgtgaacaaaacatctcaaaatatttttaaaatataaatgtataattaaatttagaatacttttcgtgaactgtaataatttactcacagttcatgctaacgatcatgtgtctaaatacaattatgaagaagattatatattacatacatgtgaaatctatataataatgcatgcttgttaaatttatattataatgaatatataatgaatattttaaatataatatatatgcgcgttagttgtcaaataaaagtctatattgctcccactattggaaaaaaaaaaaaaaaaaaaaaaaaaa

SEQ ID NO: 1925 - protein, 267 aa, Ctenocephalides felis
MTFGISVILLVSIWTTNTHAYLTSVQELDDAIRAVVSRMHRVADIESGGEYSDLGVDFPVPAIPRSQKALESDSEYDSIFDEGQLHPSLRDQEYLQHSPLWGQQYVSGGAGEGQQRLKPDGSAMNHQQVKTDNLPAYCNPPNPCPVGLTEEHGCTENFENTAAFSRDYQAAQQCMCDGEHMFRCPSSLDGDELDDSSESDEQDEHQDLLDMEGGLDTRTAPEIFMAQREYRRSGLSGNKHHKRKSTNPYLHGEKLPVAAKKGINVVY

SEQ ID NO: 1926 - DNA, 2161 bp, Ctenocephalides felis
  misc_feature (585)..(585): n = unknown
  misc_feature (588)..(588): n = unknown
ttttttttttttttttttttttttttccaatagtgggagcaatatagacttttatttgacaactaacgcgcatatatattatatttaaaatattcattatatattcattataatataaatttaacaagcatgcattattatatagatttcacatgtatgtaatatataatcttcttcataattgtatttagacacatgatcgttagcatgaactgtgagtaaattattacagttcacgaaaagtattctaaatttaattatacatttatattttaaaaatattttgagatgttttgttcacattagtatatcattattatatatccataatagaaatgatacgaagtgatttgcttgataaatataattacttatatctatgtcaaatagtgaatgcaaatcttaaaacatacacttatttcattaaacacgtatcgtgcactcattgcgtgtaatgtctattacaaaaatcggataatacaatacattacaatggtttcataatatattaaattatggaaattataaatgaacattgcacggatacaagagcatcaatggggtctgaaacacgttcaccgaaancangtgtaagtttyccaatcaattcttttctaatgtgaattgttgttaatgcaactcttcctttttcaaatttgtctcgggatgtaattgagactttattaaatttttgtgagctttttttaatttcgcaaatgcgcgcattgatggagactatatttgaaatcgtcctggggtacggaacaaacttgcaaataaataatagagagaaagacaataagaaatttgatcataccccaatcggattccaatagcattgtattagatttcattagtaatttgatgttttaatgatgtatttataatattaatatattataaatagtttactacattaaatttaattattatataatgggcctctttaatattacacaaagtaagttacacggctacttaatattaaacattgttttattagttcttaattctccttcgaataaagggttttaaccggtaatacatatgtaatgactaacgaaaactaaattatttttgtagatttttcttttgtttattcggtttgaaatcattattccgtttatcaattgccaaagtcgtttacaaatgcttttttctgaaaattaattagcatttgtttctgggttggtttatccaaaaaaataaaaatatattttgttaaattagtggtgagcgttttaaattggttcagtagacaacgttgatacccttcttagcagccactgggagtttctcaccatgcaagtagggattagtactctttcttttatgatgtttattcccactcaagccagatcgtcggtactccctttgcgccatgaagatttcaggcgcagttcgagtatcaagtccgccttccatgtccagaaggtcctggtgttcgtcctgttcgtctgattcggatgagtcgtccagttcgtctccgtctaatgaggacggacaacggaacatatgctcaccgtcgcacatgcattgctgagccgcctggtagtcgcggctgaaggctgcggtgttctcgaagttctcggtgcaaccatgctcttctgttaatccaacaggacagggattaggtggattacaataagcgggcagattatccgtttttacttgctgatgattcattgcacttccatctggtttgagcctttgttggccttcaccagcgcctccacttacgtactgctgaccccatagaggactatgctggagatattcctgatctctgaggctaggatgtaactggccttcatcgaatatggaatcatattccgaatccgattctagagctttttgagatcgtggaattgcgggtactgggaagtctactcccagatctgagtattcgccaccactttcaatatcggctactcgatgcatccgtgacaccactgctcttatggcatcgtctaattcttgcactgatgttaaatatgcatgagtatttgttgtccaaatagacactaacagaattactgaaattccgaaagtcatcgtgtaatcgcttgccagtggagatcactgtgtactaactcccagcgcaggcgagtgtgtttgaggctttggcacggtgttagagtacaagtactcacctggtgcc

SEQ ID NO: 1927 - DNA, 801 bp, Ctenocephalides felis
atgactttcggaatttcagtaattctgttagtgtctatttggacaacaaatactcatgcatatttaacatcagtgcaagaattagacgatgccataagagcagtggtgtcacggatgcatcgagtagccgatattgaaagtggtggcgaatactcagatctgggagtagacttcccagtacccgcaattccacgatctcaaaaagctctagaatcggattcggaatatgattccatattcgatgaaggccagttacatcctagcctcagagatcaggaatatctccagcatagtcctctatggggtcagcagtacgtaagtggaggcgctggtgaaggccaacaaaggctcaaaccagatggaagtgcaatgaatcatcagcaagtaaaaacggataatctgcccgcttattgtaatccacctaatccctgtcctgttggattaacagaagagcatggttgcaccgagaacttcgagaacaccgcagccttcagccgcgactaccaggcggctcagcaatgcatgtgcgacggtgagcatatgttccgttgtccgtcctcattagacggagacgaactggacgactcatccgaatcagacgaacaggacgaacaccaggaccttctggacatggaaggcggacttgatactcgaactgcgcctgaaatcttcatggcgcaaagggagtaccgacgatctggcttgagtgggaataaacatcataaaagaaagagtactaatccctacttgcatggtgagaaactcccagtggctgctaagaagggtatcaacgttgtctac

SEQ ID NO: 1928 - DNA, 801 bp, Ctenocephalides felis
gtagacaacgttgatacccttcttagcagccactgggagtttctcaccatgcaagtagggattagtactctttcttttatgatgtttattcccactcaagccagatcgtcggtactccctttgcgccatgaagatttcaggcgcagttcgagtatcaagtccgccttccatgtccagaaggtcctggtgttcgtcctgttcgtctgattcggatgagtcgtccagttcgtctccgtctaatgaggacggacaacggaacatatgctcaccgtcgcacatgcattgctgagccgcctggtagtcgcggctgaaggctgcggtgttctcgaagttctcggtgcaaccatgctcttctgttaatccaacaggacagggattaggtggattacaataagcgggcagattatccgtttttacttgctgatgattcattgcacttccatctggtttgagcctttgttggccttcaccagcgcctccacttacgtactgctgaccccatagaggactatgctggagatattcctgatctctgaggctaggatgtaactggccttcatcgaatatggaatcatattccgaatccgattctagagctttttgagatcgtggaattgcgggtactgggaagtctactcccagatctgagtattcgccaccactttcaatatcggctactcgatgcatccgtgacaccactgctcttatggcatcgtctaattcttgcactgatgttaaatatgcatgagtatttgttgtccaaatagacactaacagaattactgaaattccgaaagtcat

SEQ ID NO: 1929 - DNA, 741 bp, Ctenocephalides felis
  CDS (1)..(741)
tatttaacatcagtgcaagaattagacgatgccataagagcagtggtgtcacggatgcatcgagtagccgatattgaaagtggtggcgaatactcagatctgggagtagacttcccagtacccgcaattccacgatctcaaaaagctctagaatcggattcggaatatgattccatattcgatgaaggccagttacatcctagcctcagagatcaggaatatctccagcatagtcctctatggggtcagcagtacgtaagtggaggcgctggtgaaggccaacaaaggctcaaaccagatggaagtgcaatgaatcatcagcaagtaaaaacggataatctgcccgcttattgtaatccacctaatccctgtcctgttggattaacagaagagcatggttgcaccgagaacttcgagaacaccgcagccttcagccgcgactaccaggcggctcagcaatgcatgtgcgacggtgagcatatgttccgttgtccgtcctcattagacggagacgaactggacgactcatccgaatcagacgaacaggacgaacaccaggaccttctggacatggaaggcggacttgatactcgaactgcgcctgaaatcttcatggcgcaaagggagtaccgacgatctggcttgagtgggaataaacatcataaaagaaagagtactaatccctacttgcatggtgagaaactcccagtggctgctaagaagggtatcaacgttgtctac

SEQ ID NO: 1930 - protein, 247 aa, Ctenocephalides felis
YLTSVQELDDAIRAVVSRMHRVADIESGGEYSDLGVDFPVPAIPRSQKALESDSEYDSIFDEGQLHPSLRDQEYLQHSPLWGQQYVSGGAGEGQQRLKPDGSAMNHQQVKTDNLPAYCNPPNPCPVGLTEEHGCTENFENTAAFSRDYQAAQQCMCDGEHMFRCPSSLDGDELDDSSESDEQDEHQDLLDMEGGLDTRTAPEIFMAQREYRRSGLSGNKHHKRKSTNPYLHGEKLPVAAKKGINVVY

SEQ ID NO: 1931 - DNA, 741 bp, Ctenocephalides felis
gtagacaacgttgatacccttcttagcagccactgggagtttctcaccatgcaagtagggattagtactctttcttttatgatgtttattcccactcaagccagatcgtcggtactccctttgcgccatgaagatttcaggcgcagttcgagtatcaagtccgccttccatgtccagaaggtcctggtgttcgtcctgttcgtctgattcggatgagtcgtccagttcgtctccgtctaatgaggacggacaacggaacatatgctcaccgtcgcacatgcattgctgagccgcctggtagtcgcggctgaaggctgcggtgttctcgaagttctcggtgcaaccatgctcttctgttaatccaacaggacagggattaggtggattacaataagcgggcagattatccgtttttacttgctgatgattcattgcacttccatctggtttgagcctttgttggccttcaccagcgcctccacttacgtactgctgaccccatagaggactatgctggagatattcctgatctctgaggctaggatgtaactggccttcatcgaatatggaatcatattccgaatccgattctagagctttttgagatcgtggaattgcgggtactgggaagtctactcccagatctgagtattcgccaccactttcaatatcggctactcgatgcatccgtgacaccactgctcttatggcatcgtctaattcttgcactgatgttaaata

SEQ ID NO: 1932 - DNA, 24 bp, Artificial Sequence
  Description of Artificial Sequence:  Synthetic Primer
gcgatactggtggtactggtgaag

SEQ ID NO: 1933 - DNA, 27 bp, Artificial Sequence
  Description of Artificial Sequence:  Synthetic Primer
ccatcctaatacgactcactatagggc

SEQ ID NO: 1934 - DNA, 23 bp, Artificial Sequence
  Description of Artificial Sequence:  Synthetic Primer
gaggtggttgtcttcagtggttg

SEQ ID NO: 1935 - DNA, 23 bp, Artificial Sequence
  Description of Artificial Sequence:  Synthetic Primer
actcactatagggctcgagcggc

SEQ ID NO: 1936 - DNA, 24 bp, Artificial Sequence
  Description of Artificial Sequence:  Synthetic Primer
caattttaaacgcatccacgaccg

SEQ ID NO: 1937 - DNA, 37 bp, Artificial Sequence
  Description of Artificial Sequence:  Synthetic Primer
ccgctcgagcgacccatttcacgacttatttgaatcg

SEQ ID NO: 1938 - DNA, 36 bp, Artificial Sequence
  Description of Artificial Sequence:  Synthetic Primer
ggaattctaaaatgcacaacaaaatcctggtcctgg

SEQ ID NO: 1939 - DNA, 40 bp, Artificial Sequence
  Description of Artificial Sequence:  Synthetic Primer
gactagtaaaatgggcgttaaaaatatatatttatactgc

SEQ ID NO: 1940 - DNA, 32 bp, Artificial Sequence
  Description of Artificial Sequence:  Synthetic Primer
ccgctcgaggtactgcacgtactaacgtcatc

SEQ ID NO: 1941 - DNA, 21 bp, Artificial Sequence
  Description of Artificial Sequence:  Synthetic Primer
gtctggaagctcaggaagagg

SEQ ID NO: 1942 - DNA, 24 bp, Artificial Sequence
  Description of Artificial Sequence:  Synthetic Primer
gtaatatgcgtgacaatcgtgtgg

SEQ ID NO: 1943 - DNA, 24 bp, Artificial Sequence
  Description of Artificial Sequence:  Synthetic Primer
cggtgcaagttatagaaccttccg

SEQ ID NO: 1944 - DNA, 32 bp, Artificial Sequence
  Description of Artificial Sequence:  Synthetic Primer
cgggatcccgaatatgctgacgtagatgtgtg

SEQ ID NO: 1945 - DNA, 32 bp, Artificial Sequence
  Description of Artificial Sequence:  Synthetic Primer
ggaattctgttttattctggttggtaacattc

SEQ ID NO: 1946 - DNA, 23 bp, Artificial Sequence
  Description of Artificial Sequence:  Synthetic Primer
gatatccactttgatcagcgcac

SEQ ID NO: 1947 - DNA, 21 bp, Artificial Sequence
  Description of Artificial Sequence:  Synthetic Primer
ggtactactcctggtgcgggc

SEQ ID NO: 1948 - DNA, 23 bp, Artificial Sequence
  Description of Artificial Sequence:  Synthetic Primer
ccgtcgacattaaactcaccatc

SEQ ID NO: 1949 - DNA, 22 bp, Artificial Sequence
  Description of Artificial Sequence:  Synthetic Primer
cgatcatgcgtctagcattggc

SEQ ID NO: 1950 - DNA, 23 bp, Artificial Sequence
  Description of Artificial Sequence:  Synthetic Primer
cccgccccagttctaggttgtcc

SEQ ID NO: 1951 - DNA, 20 bp, Artificial Sequence
  Description of Artificial Sequence:  Synthetic Primer
cacacccaacctgaccaggc

SEQ ID NO: 1952 - DNA, 31 bp, Artificial Sequence
  Description of Artificial Sequence:  Synthetic Primer
atggatccggcaaaatataccaaagaagaag

SEQ ID NO: 1953 - DNA, 30 bp, Artificial Sequence
  Description of Artificial Sequence:  Synthetic Primer
atgaattcttatattggtatcgcgtccatt

SEQ ID NO: 1954 - DNA, 24 bp, Artificial Sequence
  Description of Artificial Sequence:  Synthetic Primer
agtcgcatagtgcacttctgaatg

SEQ ID NO: 1955 - DNA, 22 bp, Artificial Sequence
  Description of Artificial Sequence:  Synthetic Primer
ctgacatctgtttccacagctc

SEQ ID NO: 1956 - DNA, 24 bp, Artificial Sequence
  Description of Artificial Sequence:  Synthetic Primer
aatagtgatgttgtaagagttagg

SEQ ID NO: 1957 - DNA, 29 bp, Artificial Sequence
  Description of Artificial Sequence:  Synthetic Primer
gtttaatattgcatgtttattcattaaaa

SEQ ID NO: 1958 - DNA, 21 bp, Artificial Sequence
  Description of Artificial Sequence:  Synthetic Primer
gcgccatgaagatttcaggcg

SEQ ID NO: 1959 - DNA, 23 bp, Artificial Sequence
  Description of Artificial Sequence:  Synthetic Primer
aagtgcaatgaatcatcagcaag

1. An isolated nucleic acid molecule that hybridizes to a nucleic acid sequence selected from the group consisting of SEQ ID NO:1, SEQ ID NO:3, SEQ ID NO:4, SEQ ID NO:6, SEQ ID NO:7, SEQ ID NO:9, SEQ ID NO:10, SEQ ID NO:12, SEQ ID NO:13, SEQ ID NO:15, SEQ ID NO:16, SEQ ID NO:18, SEQ ID NO:19, SEQ ID NO:21, SEQ ID NO:22, SEQ ID NO:24, SEQ ID NO:25, SEQ ID NO:27, SEQ ID NO:28, SEQ ID NO:30, SEQ ID NO:31, SEQ ID NO:33, SEQ ID NO:34, SEQ ID NO:36, SEQ ID NO:37, SEQ ID NO:39, SEQ ID NO:40, SEQ ID NO:42, SEQ ID NO:43, SEQ ID NO:45, SEQ ID NO:46, SEQ ID NO:48, SEQ ID NO:153, SEQ ID NO:155, SEQ ID NO:156, SEQ ID NO:158, SEQ ID NO:159, SEQ ID NO:161, SEQ ID NO:162, SEQ ID NO:164, SEQ ID NO:165, SEQ ID NO:167, SEQ ID NO:168, SEQ ID NO:170, SEQ ID NO:1859, SEQ ID NO:1860, SEQ ID NO:1861, SEQ ID NO:1863, SEQ ID NO:1864, SEQ ID NO:1866, SEQ ID NO:1867, SEQ ID NO:1869, SEQ ID NO:1870, SEQ ID NO:1871, SEQ ID NO:1872, SEQ ID NO:1874, SEQ ID NO:1875, SEQ ID NO:1876, SEQ ID NO:1877, SEQ ID NO:1878, SEQ ID NO:1880, SEQ ID NO:1881, SEQ ID NO:1882, SEQ ID NO:1884, SEQ ID NO:1885, SEQ ID NO:1886, SEQ ID NO:1887, SEQ ID NO:1889, SEQ ID NO:1890, SEQ ID NO:1891, SEQ ID NO:1892, SEQ ID NO:1893, SEQ ID NO:1894, SEQ ID NO:1895, SEQ ID NO:1896, SEQ ID NO:1898, SEQ ID NO:1899, SEQ ID NO:1900, SEQ ID NO:1901, SEQ ID NO:1903, SEQ ID NO:1904, SEQ ID NO:1905, SEQ ID NO:1906, SEQ ID NO:1907, SEQ ID NO:1908, SEQ ID NO:1909, SEQ ID NO:1910, SEQ ID NO:1911, SEQ ID NO:1912, SEQ ID NO:1913, SEQ ID NO:1914, SEQ ID NO:1916, SEQ ID NO:1917, SEQ ID NO:1918, SEQ ID NO:1919, SEQ ID NO:1921, SEQ ID NO:1922, SEQ ID NO:1923, SEQ ID NO:1924, SEQ ID NO:1926, SEQ ID NO:1927, SEQ ID NO:1928, SEQ ID NO:1929, and SEQ ID NO:1931, under conditions comprising (a) hybridizing in a solution comprising 1×SSC and 0% formamide, at a temperature of about 37° C. and (b) washing in a solution comprising 1×SSC and 0% formamide, at a temperature of about 47.5° C.

2. The nucleic acid molecule of claim 1, wherein said nucleic acid molecule comprises a nucleic acid sequence that is at least about 70% identical to a nucleic acid sequence selected from the group consisting of SEQ ID NO:1, SEQ ID NO:3, SEQ ID NO:4, SEQ ID NO:6, SEQ ID NO:7, SEQ ID NO:9, SEQ ID NO:10, SEQ ID NO:12, SEQ ID NO:13, SEQ ID NO:15, SEQ ID NO:16, SEQ ID NO:18, SEQ ID NO:19, SEQ ID NO:21, SEQ ID NO:22, SEQ ID NO:24, SEQ ID NO:25, SEQ ID NO:27, SEQ ID NO:28, SEQ ID NO:30, SEQ ID NO:31, SEQ ID NO:33, SEQ ID NO:34, SEQ ID NO:36, SEQ ID NO:37, SEQ ID NO:39, SEQ ID NO:40, SEQ ID NO:42, SEQ ID NO:43, SEQ ID NO:45, SEQ ID NO:46, SEQ ID NO:48, SEQ ID NO:153, SEQ ID NO:155, SEQ ID NO:156, SEQ ID NO:158, SEQ ID NO:159, SEQ ID NO:161, SEQ ID NO:162, SEQ ID NO:164, SEQ ID NO:165, SEQ ID NO:167, SEQ ID NO:168, SEQ ID NO:170, SEQ ID NO:1859, SEQ ID NO:1860, SEQ ID NO:1861, SEQ ID NO:1863, SEQ ID NO:1864, SEQ ID NO:1866, SEQ ID NO:1867, SEQ ID NO:1869, SEQ ID NO:1870, SEQ ID NO:1871, SEQ ID NO:1872, SEQ ID NO:1874, SEQ ID NO:1875, SEQ ID NO:1876, SEQ ID NO:1877, SEQ ID NO:1878, SEQ ID NO:1880, SEQ ID NO:1881, SEQ ID NO:1882, SEQ ID NO:1884, SEQ ID NO:1885, SEQ ID NO:1886, SEQ ID NO:1887, SEQ ID NO:1889, SEQ ID NO:1890, SEQ ID NO:1891, SEQ ID NO:1892, SEQ ID NO:1893, SEQ ID NO:1894, SEQ ID NO:1895, SEQ ID NO:1896, SEQ ID NO:1898, SEQ ID NO:1899, SEQ ID NO:1900, SEQ ID NO:1901, SEQ ID NO:1903, SEQ ID NO:1904, SEQ ID NO:1905, SEQ ID NO:1906, SEQ ID NO:1907, SEQ ID NO:1908, SEQ ID NO:1909, SEQ ID NO:1910, SEQ ID NO:1911, SEQ ID NO:1912, SEQ ID NO:1913, SEQ ID NO:1914, SEQ ID NO:1916, SEQ ID NO:1917, SEQ ID NO:1918, SEQ ID NO:1919, SEQ ID NO:1921, SEQ ID NO:1922, SEQ ID NO:1923, SEQ ID NO:1924, SEQ ID NO:1926, SEQ ID NO:1927, SEQ ID NO:1928, SEQ ID NO:1929, and SEQ ID NO:1931.

3. The nucleic acid molecule of claim 1, wherein said nucleic acid molecule is selected from the group consisting of: a nucleic acid molecule comprising a nucleic acid sequence selected from the group consisting of SEQ ID NO:1, SEQ ID NO:3, SEQ ID NO:4, SEQ ID NO:6, SEQ ID NO:7, SEQ ID NO:9, SEQ ID NO:10, SEQ ID NO:12, SEQ ID NO:13, SEQ ID NO:15, SEQ ID NO:16, SEQ ID NO:18, SEQ ID NO:19, SEQ ID NO:21, SEQ ID NO:22, SEQ ID NO:24, SEQ ID NO:25, SEQ ID NO:27, SEQ ID NO:28, SEQ ID NO:30, SEQ ID NO:31, SEQ ID NO:33, SEQ ID NO:34, SEQ ID NO:36, SEQ ID NO:37, SEQ ID NO:39, SEQ ID NO:40, SEQ ID NO:42, SEQ ID NO:43, SEQ ID NO:45, SEQ ID NO:46, SEQ ID NO:48, SEQ ID NO:153, SEQ ID NO:155, SEQ ID NO:156, SEQ ID NO:158, SEQ ID NO:159, SEQ ID NO:161, SEQ ID NO:162, SEQ ID NO:164, SEQ ID NO:165, SEQ ID NO:167, SEQ ID NO:168, SEQ ID NO:170, SEQ ID NO:1859, SEQ ID NO:1860, SEQ ID NO:1861, SEQ ID NO:1863, SEQ ID NO:1864, SEQ ID NO:1866, SEQ ID NO:1867, SEQ ID NO:1869, SEQ ID NO:1870, SEQ ID NO:1871, SEQ ID NO:1872, SEQ ID NO:1874, SEQ ID NO:1875, SEQ ID NO:1876, SEQ ID NO:1877, SEQ ID NO:1878, SEQ ID NO:1880, SEQ ID NO:1881, SEQ ID NO:1882, SEQ ID NO:1884, SEQ ID NO:1885, SEQ ID NO:1886, SEQ ID NO:1887, SEQ ID NO:1889, SEQ ID NO:1890, SEQ ID NO:1891, SEQ ID NO:1892, SEQ ID NO:1893, SEQ ID NO:1894, SEQ ID NO:1895, SEQ ID NO:1896, SEQ ID NO:1898, SEQ ID NO:1899, SEQ ID NO:1900, SEQ ID NO:1901, SEQ ID NO:1903, SEQ ID NO:1904, SEQ ID NO:1905, SEQ ID NO:1906, SEQ ID NO:1907, SEQ ID NO:1908, SEQ ID NO:1909, SEQ ID NO:1910, SEQ ID NO:1911, SEQ ID NO:1912, SEQ ID NO:1913, SEQ ID NO:1914, SEQ ID NO:1916, SEQ ID NO:1917, SEQ ID NO:1918, SEQ ID NO:1919, SEQ ID NO:1921, SEQ ID NO:1922, SEQ ID NO:1923, SEQ ID NO:1924, SEQ ID NO:1926, SEQ ID NO:1927, SEQ ID NO:1928, SEQ ID NO:1929, and SEQ ID NO:1931; and a nucleic acid molecule comprising an allelic variant of a nucleic acid molecule selected from the group consisting of SEQ ID NO:1, SEQ ID NO:3, SEQ ID NO:4, SEQ ID NO:6, SEQ ID NO:7, SEQ ID NO:9, SEQ ID NO:10, SEQ ID NO:12, SEQ ID NO:13, SEQ ID NO:15, SEQ ID NO:16, SEQ ID NO:18, SEQ ID NO:19, SEQ ID NO:21, SEQ ID NO:22, SEQ ID NO:24, SEQ ID NO:25, SEQ ID NO:27, SEQ ID NO:28, SEQ ID NO:30, SEQ ID NO:31, SEQ ID NO:33, SEQ ID NO:34, SEQ ID NO:36, SEQ ID NO:37, SEQ ID NO:39, SEQ ID NO:40, SEQ ID NO:42, SEQ ID NO:43, SEQ ID NO:45, SEQ ID NO:46, SEQ ID NO:48, SEQ ID NO:153, SEQ ID NO:155, SEQ ID NO:156, SEQ ID NO:158, SEQ ID NO:159, SEQ ID NO:161, SEQ ID NO:162, SEQ ID NO:164, SEQ ID NO:165, SEQ ID NO:167, SEQ ID NO:168, SEQ ID NO:170, SEQ ID NO:1859, SEQ ID NO:1860, SEQ ID NO:1861, SEQ ID NO:1863, SEQ ID NO:1864, SEQ ID NO:1866, SEQ ID NO:1867, SEQ ID NO:1869, SEQ ID NO:1870, SEQ ID NO:1871, SEQ ID NO:1872, SEQ ID NO:1874, SEQ ID NO:1875, SEQ ID NO:1876, SEQ ID NO:1877, SEQ ID NO:1878, SEQ ID NO:1880, SEQ ID NO:1881, SEQ ID NO:1882, SEQ ID NO:1884, SEQ ID NO:1885, SEQ ID NO:1886, SEQ ID NO:1887, SEQ ID NO:1889, SEQ ID NO:1890, SEQ ID NO:1891, SEQ ID NO:1892, SEQ ID NO:1893, SEQ ID NO:1894, SEQ ID NO:1895, SEQ ID NO:1896, SEQ ID NO:1898, SEQ ID NO:1899, SEQ ID NO:1900, SEQ ID NO:1901, SEQ ID NO:1903, SEQ ID NO:1904, SEQ ID NO:1905, SEQ ID NO:1906, SEQ ID NO:1907, SEQ ID NO:1908, SEQ ID NO:1909, SEQ ID NO:1910, SEQ ID NO:1911, SEQ ID NO:1912, SEQ ID NO:1913, SEQ ID NO:1914, SEQ ID NO:1916, SEQ ID NO:1917, SEQ ID NO:1918, SEQ ID NO:1919, SEQ ID NO:1921, SEQ ID NO:1922, SEQ ID NO:1923, SEQ ID NO:1924, SEQ ID NO:1926, SEQ ID NO:1927, SEQ ID NO:1928, SEQ ID NO:1929, and SEQ ID NO:1931.

4. The nucleic acid molecule of claim 1, wherein said nucleic acid molecule encodes a protein comprising an amino acid sequence that is at least about 75% identical to an amino acid sequence selected from the group consisting of SEQ ID NO:2, SEQ ID NO:8, SEQ ID NO:14, SEQ ID NO:20, SEQ ID NO:26, SEQ ID NO:32, SEQ ID NO:38, SEQ ID NO:44, SEQ ID NO:154, SEQ ID NO:160, SEQ ID NO:163, SEQ ID NO:169, SEQ ID NO:1862, SEQ ID NO:1868, SEQ ID NO:1873, SEQ ID NO:1879, SEQ ID NO:1883, SEQ ID NO:1888, SEQ ID NO:1897, SEQ ID NO:1902, SEQ ID NO:1915, SEQ ID NO:1920, SEQ ID NO:1925, and SEQ ID NO:1930.

5. The nucleic acid molecule of claim 1, wherein said nucleic acid molecule encodes a protein comprising an amino acid sequence selected from the group consisting of SEQ ID NO:2, SEQ ID NO:8, SEQ ID NO:14, SEQ ID NO:20, SEQ ID NO:26, SEQ ID NO:32, SEQ ID NO:38, SEQ ID NO:44, SEQ ID NO:154, SEQ ID NO:160, SEQ ID NO:163, SEQ ID NO:169, SEQ ID NO:1862, SEQ ID NO:1868, SEQ ID NO:1873, SEQ ID NO:1879, SEQ ID NO:1883, SEQ ID NO:1888, SEQ ID NO:1897, SEQ ID NO:1902, SEQ ID NO:1915, SEQ ID NO:1920, SEQ ID NO:1925, and SEQ ID NO:1930.

6-8. (canceled)

9. A method to produce a protein encoded by a nucleic acid molecule that hybridizes to a nucleic acid sequence selected from the group consisting of SEQ ID NO:3, SEQ ID NO:6, SEQ ID NO:9, SEQ ID NO:12, SEQ ID NO:15, SEQ ID NO:18, SEQ ID NO:21, SEQ ID NO:24, SEQ ID NO:27, SEQ ID NO:30, SEQ ID NO:33, SEQ ID NO:36, SEQ ID NO:39, SEQ ID NO:42, SEQ ID NO:45, SEQ ID NO:48, SEQ ID NO:155, SEQ ID NO:158, SEQ ID NO:161, SEQ ID NO:164, SEQ ID NO:167, SEQ ID NO:170, SEQ ID NO:1860, SEQ ID NO:1863, SEQ ID NO:1866, SEQ ID NO:1869, SEQ ID NO:1871, SEQ ID NO:1874, SEQ ID NO:1876, SEQ ID NO:1880, SEQ ID NO:1884, SEQ ID NO:1886, SEQ ID NO:1889, SEQ ID NO:1891, SEQ ID NO:1893, SEQ ID NO:1895, SEQ ID NO:1898, SEQ ID NO:1900, SEQ ID NO:1903, SEQ ID NO:1905, SEQ ID NO:1907, SEQ ID NO:1909, SEQ ID NO:1911, SEQ ID NO:1913, SEQ ID NO:1916, SEQ ID NO:1918, SEQ ID NO:1921, SEQ ID NO:1923, SEQ ID NO:1926, SEQ ID NO:1928, and SEQ ID NO:1931, under conditions comprising (a) hybridizing in a solution comprising 1×SSC and 0% formamide, at a temperature of about 37° C. and (b) washing in a solution comprising 1×SSC and 0% formamide, at a temperature of about 47.5° C., said method comprising culturing a cell transformed with a nucleic acid molecule encoding said protein.

10. The method of claim 9, wherein said nucleic acid molecule encodes a protein having an amino acid sequence selected from the group consisting of SEQ ID NO:29 SEQ ID NO:8, SEQ ID NO:14, SEQ ID NO:20, SEQ ID NO:26, SEQ ID NO:32, SEQ ID NO:38, SEQ ID NO:44, SEQ ID NO:154, SEQ ID NO:160, SEQ ID NO:163, SEQ ID NO:169, SEQ ID NO:1862, SEQ ID NO:1868, SEQ ID NO:1873, SEQ ID NO:1879, SEQ ID NO:1883, SEQ ID NO:1888, SEQ ID NO:1897, SEQ ID NO:1902, SEQ ID NO:1915, SEQ ID NO:1920, SEQ ID NO:1925, and SEQ ID NO:1930.

11. The method of claim 9, wherein said nucleic acid molecule is selected from the group consisting of: a nucleic acid molecule comprising a nucleic acid sequence selected from the group consisting of SEQ ID NO:1, SEQ ID NO:4, SEQ ID NO:7, SEQ ID NO:10, SEQ ID NO:13, SEQ ID NO:16, SEQ ID NO:19, SEQ ID NO:22, SEQ ID NO:25, SEQ ID NO:28, SEQ ID NO:31, SEQ ID NO:34, SEQ ID NO:37, SEQ ID NO:40, SEQ ID NO:43, SEQ ID NO:46, SEQ ID NO:153, SEQ ID NO:156, SEQ ID NO:159, SEQ ID NO:162, SEQ ID NO:165, SEQ ID NO:168, SEQ ID NO:1859, SEQ ID NO:1861, SEQ ID NO:1864, SEQ ID NO:1867, SEQ ID NO:1870, SEQ ID NO:1872, SEQ ID NO:1875, SEQ ID NO:1877, SEQ ID NO:1878, SEQ ID NO:1881, SEQ ID NO:1882, SEQ ID NO:1885, SEQ ID NO:1887, SEQ ID NO:1890, SEQ ID NO:1892, SEQ ID NO:1894, SEQ ID NO:1896, SEQ ID NO:1899, SEQ ID NO:1901, SEQ ID NO:1904, SEQ ID NO:1906, SEQ ID NO:1908, SEQ ID NO:1910, SEQ ID NO:1912, SEQ ID NO:1914, SEQ ID NO:1917, SEQ ID NO:1919, SEQ ID NO:1922, SEQ ID NO:1924, SEQ ID NO:1927, and SEQ ID NO:1929; and a nucleic acid molecule comprising an allelic variant of a nucleic acid molecule selected from the group consisting of SEQ ID NO:1, SEQ ID NO:4, SEQ ID NO:7, SEQ ID NO:10, SEQ ID NO:13, SEQ ID NO:16, SEQ ID NO:19, SEQ ID NO:22, SEQ ID NO:25, SEQ ID NO:28, SEQ ID NO:31, SEQ ID NO:34, SEQ ID NO:37, SEQ ID NO:40, SEQ ID NO:43, SEQ ID NO:46, SEQ ID NO:153, SEQ ID NO:156, SEQ ID NO:159, SEQ ID NO:162, SEQ ID NO:165, SEQ ID NO:168, SEQ ID NO:1859, SEQ ID NO:1861, SEQ ID NO:1864, SEQ ID NO:1867, SEQ ID NO:1870, SEQ ID NO:1872, SEQ ID NO:1875, SEQ ID NO:1877, SEQ ID NO:1878, SEQ ID NO:1881, SEQ ID NO:1882, SEQ ID NO:1885, SEQ ID NO:1887, SEQ ID NO:1890, SEQ ID NO:1892, SEQ ID NO:1894, SEQ ID NO:1896, SEQ ID NO:1899, SEQ ID NO:1901, SEQ ID NO:1904, SEQ ID NO:1906, SEQ ID NO:1908, SEQ ID NO:1910, SEQ ID NO:1912, SEQ ID NO:1914, SEQ ID NO:1917, SEQ ID NO:1919, SEQ ID NO:1922, SEQ ID NO:1924, SEQ ID NO:1927, and SEQ ID NO:1929.

12. An isolated protein selected from the group consisting of: (a) an isolated protein encoded by a nucleic acid molecule that hybridizes to a nucleic acid sequence selected from the group consisting of SEQ ID NO:3, SEQ ID NO:6, SEQ ID NO:9, SEQ ID NO:12, SEQ ID NO:15, SEQ ID NO:18, SEQ ID NO:21, SEQ ID NO:24, SEQ ID NO:27, SEQ ID NO:30, SEQ ID NO:33, SEQ ID NO:36, SEQ ID NO:39, SEQ ID NO:42, SEQ ID NO:45, SEQ ID NO:48, SEQ ID NO:155, SEQ ID NO:158, SEQ ID NO:161, SEQ ID NO:164, SEQ ID NO:167, SEQ ID NO:170, SEQ ID NO:1860, SEQ ID NO:1863, SEQ ID NO:1866, SEQ ID NO:1869, SEQ ID NO:1871, SEQ ID NO:1874, SEQ ID NO:1876, SEQ ID NO:1880, SEQ ID NO:1884, SEQ ID NO:1886, SEQ ID NO:1889, SEQ ID NO:1891, SEQ ID NO:1893, SEQ ID NO:1895, SEQ ID NO:1898, SEQ ID NO:1900, SEQ ID NO:1903, SEQ ID NO:1905, SEQ ID NO:1907, SEQ ID NO:1909, SEQ ID NO:1911, SEQ ID NO:1913, SEQ ID NO:1916, SEQ ID NO:1918, SEQ ID NO:1921, SEQ ID NO:1923, SEQ ID NO:1926, SEQ ID NO:1928, and SEQ ID NO:1931, under conditions comprising (1) hybridizing in a solution comprising 1×SSC and 0% formamide, at a temperature of about 37° C. and (2) washing in a solution comprising 1×SSC and 0% formamide, at a temperature of about 47.5° C.; and (b) an isolated protein comprising an amino acid sequence that is at least about 75% identical to an amino acid sequence selected from the group consisting of SEQ ID NO:2, SEQ ID NO:8, SEQ ID NO:14, SEQ ID NO:20, SEQ ID NO:26, SEQ ID NO:32, SEQ ID NO:38, SEQ ID NO:44, SEQ ID NO:154, SEQ ID NO:160, SEQ ID NO:163, SEQ ID NO:169, SEQ ID NO:1862, SEQ ID NO:1868, SEQ ID NO:1873, SEQ ID NO:1879, SEQ ID NO:1883, SEQ ID NO:1888, SEQ ID NO:1897, SEQ ID NO:1902, SEQ ID NO:1915, SEQ ID NO:1920, SEQ ID NO:1925, and SEQ ID NO:1930.

13. The protein of claim 12, wherein said nucleic acid molecule comprises a nucleic acid sequence that is at least about 70% identical to a nucleic acid sequence selected from the group consisting of SEQ ID NO:1, SEQ ID NO:4, SEQ ID NO:7, SEQ ID NO:10, SEQ ID NO:13, SEQ ID NO:16, SEQ ID NO:19, SEQ ID NO:22, SEQ ID NO:25, SEQ ID NO:28, SEQ ID NO:31, SEQ ID NO:34, SEQ ID NO:37, SEQ ID NO:40, SEQ ID NO:43, SEQ ID NO:46, SEQ ID NO:153, SEQ ID NO:156, SEQ ID NO:159, SEQ ID NO:162, SEQ ID NO:165, SEQ ID NO:168, SEQ ID NO:1859, SEQ ID NO:1861, SEQ ID NO:1864, SEQ ID NO:1867, SEQ ID NO:1870, SEQ ID NO:1872, SEQ ID NO:1875, SEQ ID NO:1877, SEQ ID NO:1878, SEQ ID NO:1881, SEQ ID NO:1882, SEQ ID NO:1885, SEQ ID NO:1887, SEQ ID NO:1890, SEQ ID NO:1892, SEQ ID NO:1894, SEQ ID NO:1896, SEQ ID NO:1899, SEQ ID NO:1901, SEQ ID NO:1904, SEQ ID NO:1906, SEQ ID NO:1908, SEQ ID NO:1910, SEQ ID NO:1912, SEQ ID NO:1914, SEQ ID NO:1917, SEQ ID NO:1919 SEQ ID NO:1922, SEQ ID NO:1924, SEQ ID NO:1927, and SEQ ID NO:1929.

14. The protein of claim 12, wherein said nucleic acid molecule is selected from the group consisting of: a nucleic acid molecule comprising a nucleic acid sequence selected from the group consisting of SEQ ID NO:1, SEQ ID NO:4, SEQ ID NO:7, SEQ ID NO:10, SEQ ID NO:13, SEQ ID NO:16, SEQ ID NO:19, SEQ ID NO:22, SEQ ID NO:25, SEQ ID NO:28, SEQ ID NO:31, SEQ ID NO:34, SEQ ID NO:37, SEQ ID NO:40, SEQ ID NO:43, SEQ ID NO:46, SEQ ID NO:153, SEQ ID NO:156, SEQ ID NO:159, SEQ ID NO:162, SEQ ID NO:165, SEQ ID NO:168, SEQ ID NO:1859, SEQ ID NO:1861, SEQ ID NO:1864, SEQ ID NO:1867, SEQ ID NO:1870, SEQ ID NO:1872, SEQ ID NO:1875, SEQ ID NO:1877, SEQ ID NO:1878, SEQ ID NO:1881, SEQ ID NO:1882, SEQ ID NO:1885, SEQ ID NO:1887, SEQ ID NO:1890, SEQ ID NO:1892, SEQ ID NO:1894, SEQ ID NO:1896, SEQ ID NO:1899, SEQ ID NO:1901, SEQ ID NO:1904, SEQ ID NO:1906, SEQ ID NO:1908, SEQ ID NO:1910, SEQ ID NO:1912, SEQ ID NO:1914, SEQ ID NO:1917, SEQ ID NO:1919, SEQ ID NO:1922, SEQ ID NO:1924, SEQ ID NO:1927, and SEQ ID NO:1929; and a nucleic acid molecule comprising an allelic variant of a nucleic acid molecule selected from the group consisting of SEQ ID NO:1, SEQ ID NO:4, SEQ ID NO:7, SEQ ID NO:10, SEQ ID NO:13, SEQ ID NO:16, SEQ ID NO:19, SEQ ID NO:22, SEQ ID NO:25, SEQ ID NO:28, SEQ ID NO:31, SEQ ID NO:34, SEQ ID NO:37, SEQ ID NO:40, SEQ ID NO:43, SEQ ID NO:46, SEQ ID NO:153, SEQ ID NO:156, SEQ ID NO:159, SEQ ID NO:162, SEQ ID NO:165, SEQ ID NO:168, SEQ ID NO:1859, SEQ ID NO:1861, SEQ ID NO:1864, SEQ ID NO:1867, SEQ ID NO:1870, SEQ ID NO:1872, SEQ ID NO:1875, SEQ ID NO:1877, SEQ ID NO:1878, SEQ ID NO:1881, SEQ ID NO:1882, SEQ ID NO:1885, SEQ ID NO:1887, SEQ ID NO:1890, SEQ ID NO:1892, SEQ ID NO:1894, SEQ ID NO:1896, SEQ ID NO:1899, SEQ ID NO:1901, SEQ ID NO:1904, SEQ ID NO:1906, SEQ ID NO:1908, SEQ ID NO:1910, SEQ ID NO:1912, SEQ ID NO:1914, SEQ ID NO:1917, SEQ ID NO:1919, SEQ ID NO:1922, SEQ ID NO:1924, SEQ ID NO:1927, and SEQ ID NO:1929.

15. The protein of claim 12, wherein said protein comprises an amino acid sequence that is at least about 75% identical to an amino acid sequence selected from the group consisting of SEQ ID NO:2, SEQ ID NO:8, SEQ ID NO:14, SEQ ID NO:20, SEQ ID NO:26, SEQ ID NO:32, SEQ ID NO:38, SEQ ID NO:44, SEQ ID NO:154, SEQ ID NO:160, SEQ ID NO:163, SEQ ID NO:169, SEQ ID NO:1862, SEQ ID NO:1868, SEQ ID NO:1873, SEQ ID NO:1879, SEQ ID NO:1883, SEQ ID NO:1888, SEQ ID NO:1897, SEQ ID NO:1902, SEQ ID NO:1915, SEQ ID NO:1920, SEQ ID NO:1925, and SEQ ID NO:1930.

16. The protein of claim 12, wherein said protein comprises an amino acid sequence selected from the group consisting of SEQ ID NO:2, SEQ ID NO:8, SEQ ID NO:14, SEQ ID NO:20, SEQ ID NO:26, SEQ ID NO:32, SEQ ID NO:38, SEQ ID NO:44, SEQ ID NO:154, SEQ ID NO:160, SEQ ID NO:163, SEQ ID NO:169, SEQ ID NO:1862, SEQ ID NO:1868, SEQ ID NO:1873, SEQ ID NO:1879, SEQ ID NO:1883, SEQ ID NO:1888, SEQ ID NO:1897, SEQ ID NO:1902, SEQ ID NO:1915, SEQ ID NO:1920, SEQ ID NO:1925, and SEQ ID NO:1930.

17. An isolated antibody that selectively binds to a protein as set forth in claim 12.

18. A method to identify a compound capable of inhibiting activity of an isolated protein of claim 12, said method comprising contacting an isolated protein of claim 12 with a putative inhibitory compound under conditions in which, in the absence of said compound, said protein has activity; and determining if said putative inhibitory compound inhibits said activity.

19. A kit to identify a compound capable of inhibiting activity of an isolated protein of claim 12, said test kit comprising an isolated protein of claim 12 and a means for determining the extent of inhibition of said activity in the presence of a putative inhibitory compound.

20-21. (canceled)

22. A method to protect an animal, said method comprising administering to said animal a protein of claim 12.

23-26. (canceled)
